United States Patent Application Publication US 2024/0404707 A1 - sequence listing, part 7

SEQ ID NO: 939 - DNA, 14780 bp, Homo sapiens
  source 1..14780: mol_type = other DNA
tttctccttccctccacgggccgggtgagaaagtagccgggggctatcccgacccggcggttcttggggagggggccgaacaagaaaagggaggagatggagataacttccccggatttagcttttttgtctttgtttttgttctcaccacttccatcggatgactggagagtaaaagggaacccggagcggggtggcgagcagcgctttgagaaaatgcaggagtgtgtttggagacgcgtaaagttgcctttcaagctctggcctccgggcacgcgatgctccgcggcgggctgactcagggctgccttgggcctccctgccaccctcctggaaatgatgcaagtcctgactgtcacctggatccctgcagcccagcctggaatgcgtctggattaggggaaagacgagaaacgacactccaggtgttgcacggcccaccaaagcgggaagatagggcagttgctcagaccaaatactgtatctagtgcttctgctcctatcttcaatcgtggggttctttttaatgcaaagtgtcacaaggccaggaattcccatgtgtgctcagttggcccacagcatcattgtgcctaggaaactgcttcaatttatcaagtcctctgggctgggaatctcactgaattccaaacggcggaaagaggaaactttcccaacccgatgtgggtgtgacgcgagccaggggccccagggacactgtcccagagcacaccgtccccctttaacagcaactggagcttggattcgctcttatattgtacagtcctttcgaccattgccctggagcacccgcacacgcgcacgcatctccggccgcgctcacacacactcatacacacgcacgcaaacgcgtggccgccgccaggtcggcaactttgtccggcgctcccagcggcgctcggcttcctcctgtagtagttgagcgcaggccccgcctcccggccgtgttgtcaaaagggccggggtctcggattggtccagccgccgggacaacacctgctcgactccttcattcaagtgacaccagagcttccagggatatttgaggcaccatccctgccattgccgggcactcgcggcgctgctaacggcctggtcacatgctctccggagagctacgggagggcgctgggtaacctctatccgagccgcggccgcgaggaggagggaaaaggcgagcaaaaaggaagagtgggaggaggaggggaagcggcgaaggaggaagaggaggaggaggaagaggggagcacaaaggatccaggtctcccgacgggaggttaataccaagaaccatgtgtgccgagcggctgggccagttcatgaccctggctttggtgttggccacctttgacccggcgcgggggaccgacgccaccaacccacccgagggtccccaagacaggagctcccagcagaaaggccgcctgtccctgcagaatacaggtaagtgcatgtgcccccgcagccgggagctactgggagaggacaccgtgcacccacgcggcgcgccccaggcgtttcgccgggagccaggcgcccacccagggccacgcaaactcttgggatggcacgggacgtgcaaagggaagcgcgaggcaaggcgaggtccgcgccgggctccgagggcccggaatctgcacgtgctagcagggtgatgaaatggctggggcaggacttgttgctgtcctccccagggtcgaggggaaatgaagcagcgtctgacgctgccagcgccagcccccgcccccgaatcccgggtccggtgcaaagcgcgcttcatcccggccggcacgcgggaggcccagagggtccccggagctgggctgcgccctgcgcccggagaacttctcttcctggcctgccggcctcagtaagggtgccgcgtcttccccctcctcaaaagatgcccgacatcccagaactttgccggcgagacaaatggcattgcgaactttccccctgggggcactgctttcggaagggagcgtgagggcagcgcaaagcgtacctccgcggtgctgccgccatccccagctcctggccaggtcagcaagccaagaaatggtgacacgacccgaaccgtgcgcctcctctgctctaccggctcttggctcaccggcaagctgcaaagcagagccaggcgtgcagggcacggggctggcccttttcccagctcggaaagagaaagaaaatctgcctacagctccttcgctccacgacccctcccccgactttggggggccgtgtgaacgcggcagcggcggcgtgcgtgcgctcaccgcacgagctggaatgcacgagtgcccattagggacgccccaagtgagtgaatggcggccctgtgcggtcctgccccggcggcgcgtggggtcttacggatcctgtcgcctccacatgctggggccggcacccccaccaccccgagaccctcgcccaccctccccctcctctggcgcttcctctgagaactgaacctgattctcggtggtcggtgaccctcaacaatacacgcccctcattctctggctagatttaatctgatgcgggttatctgctccgaccccgcccttcttccaaaatatacttttctgatgtaattttgtggttgatttaaatcagagacttgggtagtggaaagggagggaagaggctttgcacgctgcagcctgacagttaactccctccgtctgccccttccgagagaggactgggggccacattcggtgaagggctgcaagcttcctcccgggctgcgggaattctaggggattgggtgatacctcacccggatccctaattaaaaggagcctgcaacctctgatagtggcgtttctgaaggctcgcccccagctgactccactcctaagcctgctcgccaaccgcagcttccctagctggtattttaatgcgaagggttgggaggcactgccttaataggaattttgttttgatttttaggtgttgaatcataaagctgaattgaaactgctttttagatgctgtcatttgggggtcaggaagcaaatggctgtgatttaatagcagcaacttctacagatcaagtagagaagggtacttcattgatgaagtacagtcttcgactcaaaattttatttttgtctgtgggtttaaaaagcggaaatatattttgctctcaaactaagtattcccacaaatactttaataaaatggaaaggatgaaaaggaggaatgctcagaccagccttctggttgtaatttttgtaatttttcggctcttttctacaaatatttacaaatagagatatttttcatgagtagattaaaggacgaaattttgtttcccaggctttttaggtcctgaaatagtcattactaagtcttttttcctccttaaattttcctttagttgttaacttttatttcaaatgacctctctgcattgcccagcatgggttagagttttgtatatatttgtatgtgattttccttttagcggagatccagcactgtttggtcaacgctggcgatgtggggtgtggcgtgtttgaatgtttcgagaacaactcttgtgagattcggggcttacatgggatttgcatgacttttctgcacaacgctggaaaatttgatgcccaggtaaaaatccatccagagcatgaagaatgtttggggtgagcatacatgattgaaacgttcattggaaagccttgttaaccaacttcctttgctgttccttgtggtgtgttttagtgcttgcaagcgacagtctaggtataaaacattatgccagtgtctcccttctgcactcataagctgtgtctacacaggcagggtggactggagaccaatgtcataataaacgataaacaccttgtaaggggacacgctgtgtctggccacccagaactcagtctccaaagcccactgcatgagaggcaggggcaggaacccccaattatacatttcagaagtcatttcacctactaggaaaatgagacacaaagtatgtagaaatccgtcatgtggtgtgtgggcagccaacccgaataactcaggacctccaaaagagcagacttctattcctcctgagtagcagatctttctctcccaagctgaccggtcgaaaccctgattgagtccttcagttccacactttccttttgctctatatgataaatatagtcagggcctgacccacttcggttatcccagggtcccaaggggaacgcggagttgctgctcagggcaaggcaggaacacaacaagcaacatatggctccagtgccaacaacgcaaatacatttttagatggcatgtggcatcagactcaccttcttcgtgttctccctggccacttatatgccctgttgaaacgccctgttactatatctcagaaacgtctctcctgcttcattggagagcaatgccaacatttggaggtggccatcagcttaggtgagatttatggatgtcaccagtccccatccactgacatatagtagtgagcctgacaaagcagtgcctgggaacaaggaggggaggcgaagacggggctggcagcctaaactgcagaggatgtgcggtgtggccagaggggaaactgaaaccagggaaggaaagaggtagaactttgaactccttgaggctccctaataaagcatcactctggattaacgggaattaggaaacgtaataggaaatccggaggaaagacgtgtatttaagggcaatcccacaggatgtcagggaagaataccaagaacagattgccacagccctcgcataaattcatcttcctcttttttttcccaaccaacaggaatacgttctcaagttagagacatccctttcaagttgatgctcagcacataactgcttaataaacgggcacaccctgccctccattctgtttggctctggctggagagtcaaaagagagggggccacggggaggccatgcgggccacatggtttttcagagatcagacgctatctgtagacatttctatggctgctaaagacaaaaccaaaataaatgtgctggctggcttcccacttccaacctaaacccatttactttctcaactcagtgacttccgggcctgtctaaaaacagaggggtgacctctccgacgacagctagtttctatagtaatgtggggtgcggggattcccgggtaggcatcccacaatgcctccgggctgcgcgaggttgataagggagcagcaccgagctcgcctccacacccccaacagctgtctcctttctaggataagcacaatcagacggggttgccaggaaagagaactgcaggccagatgtatgcctggctgccttcgccactcggaggcagggagcgtgggggaggggccgccagtgcggcagttcagactccagatgctgccaggcagggtgccaggccagccttttagaggcaataatccgaacagtttaaaggagtagagtcattttcaaaaaggaaaagagcgctcttcctggtagggtaggaggagacaagggtatggatttggggcgtgggaggcacggaggcagaaagggaggtacaatcagcaatcaatctcggtgtcgcccctggaatcaagggaaaaaggaaacgtgtgagatttggacatgcaggcaccttccacttagggaagactgcttgtgagaaccgtgagggatttatggatttgtgtctggccaaattccctttgtgttccagaaaagttgccaccacacaaccaacacagggctacctgagggacacatagccacggaagcccccgttggagggaaactcacagagtagccagggaggaaggagggagatgtgttcgtctacagaatgaacatcccttgttgcccagtgctgggggtgtcatgtcactctggacgtgcctccggatgtcgcattgcctgtcacctgggaggacgtccgtctctggtggggccttggggttctgatgtcagaaatatcctgtgtaagcccaagaagggctgaaatgtccaagcatgtaacgaggtcttctgctttctgcccctctctcccttccccggcctgtgtgttctcagggcaagtcattcatcaaagacgccttgaaatgtaaggcccacgctctgcggcacaggttcggctgcataagccggaagtgcccggccatcagggaaatggtgtcccagttgcagcgggaatgctacctcaagcacgacctgtgcgcggctgcccaggagaacacccgggtgatagtggagatgatccatttcaaggacttgctgctgcacgagtgagtactgccccgcagagggcctgggtgaaggggccacccagcaaggatggcaatgtgtatgggaggagagccgcgttgcttctagaggctgaatgcctgtcaaatggagaaggcttccatttacttcagaaagctacactgactctactaaaaggcccctttcctgctggcttttaggaaaagagagaattccctcatcagtctcaaaatcacaagcaacagaaatgggaaatcgttttactaagaatgaaatgtgtcgattcagtaatactcttcatcttccccttagccaagaacccactagctctcagaatattctgagtagctgtagaggtgtccttacagacagcaaattgctaataacatttgttgaatatttactaagcgccaggcactgggctaagggctccttgtgaatttttcacttgatcctcaccacagccctcgtcacctccatttgacagatgagaaaactgagactcactaaggcagagctcacacagctagtgacaggcaaagccagacttgggacctggctccagtctgctgagcagtctgcctccagaacctatactcttaaatcccgaaaacagagctatagatgcttttcctgcctccttaactttcctttcccttagaaggttcggtttaccttctctcatacattagtgccctctcagaggaaatgcaaaacaagtgccaaaaactttaatcagctaaacacttctatgccaaaacaaggaaatgtgaacttacttatttcaagacttgaaattcaatgataaattcaggatgcatcatttcttacaaaatatttcagccacaggatcctaaattttgcagcatggtaaagcatgttggtacacaattgttcctaacatgaggcagggccaggagcccctgaagattttttttttaaatattgacaatggctctttcctaagagacacagggcagaaagaaagccactagccaaccagttcagtacaagtcattaccagtttgatggcactgttggtctctccacggtgactcattgagccaaatcggtataattttatgaactcttgatcctcagtttgtgccacaaccttcttccagttatgtccctaccacaccaacaccacttagatgacagagaacagcaagcacctcctgtctctttccacttggttataaggtcataggcatcttgcaacacccttgctacagtgttagaatcatacaattcatggcgaaactctgcaggaagctcttgccaaaagcaaaacaatattgcattttcctcgaattaggctaacgccttacaaaatattttttattcttcaaatatttttaagggaacaatagcagccacagcatcatcaacaacaatgatagctgtctttttttatgtttttttaattttttttctaatggtctaggcccttggccagggcctttacatgggttatctcatttatctttcccaaagatgctacaagatagaaattactatgcccaagaggaggaaagtgaagctaagagattagagaactcggactgaggtttgattcctgcttttaagcttcggaattgctggtatacatgactgaagccagtcatcaggaatagacttcaaacctgctcccagcctattatctccctcctagacctgaaagggctcacagctccccacatgtggtgggcttcttgtccttttatcaaatatatccccattacacaaggagaacactctaaaattcccttccttcaggtgcctctggaagagaaaaatgccccatggctaggaaacaccgtgagcttcactcgcctctagccctgtcccccattagagagagtttgctggcctcaggaatcggtggggaatggggcccattcctagtttataaggctataatgcatgcctggagcacaggaattctatctttcttggagaaaagtattctttgggaaaactgaaggttggaagtcccaccccctccccttaatttaagaagaaggtaaagctctctggcgttctagtgtctccttcttgggaatgtggccctcggggccatggtctcctcacaccattcagaatgagcctatgaccccccaccccagcctgctctggaaatgcaggcagcccatataagaagcctggtcacatgctgttcctcttgcttccccctaagtcagcatctctaggcaggggtctcccctaactccagcttcccaaaaacccccattacctttccttctgaagccatgatgtggcggtgcatcgacttgtacttctagctgaactgcctgttttttaggtttttttttcccaaccatcttaactgattaaagtatcctatcagtccccaaatatcaagaagcccatttccaaatgtgtggcattggtcaaaaaaaaaaaaaaagagagaactgaatttgcttttcactttagagatgaggaaatcacagtcaccccagaatctgcaccacccccattcttcaacccaacccccatccacaccagaacactcacccccagttaatgctgctcttttcaagctcttcctctccgctcccctcaccccttcctgcccgccccactttctgcacagcatctgtctccccctagctgccgcctgcctggttttacccccactcgccatgtcactgggtgctggcaggctccaggcacatccccctccaagtattttttaaaatcctttaggcttgctgacacccagttgaacgagctggactttgtcattagacacgggctgagcttgcagcctcagaaggcaccaggccagctcggaacacggcttggattaacttggttcggcacacacacccctccccgcagttcacagcttcctcctggagagagagagggccaagggcagaggacagcatgggctcatccagccttctgggatccagatccgccctgggcttctgggggctcatctggcagacagaacgccctggccgggaaggcgaaagacagtctgcatattcccaagacagccctccccttactctggggaaaggagcttgaagacagcatccagttagtatctcagaaagacagaccctcacccctgcagtgtgctcacctagccctggtgccgcggcaggcacagtcaggtgctaaaatcctgttgctgctttagcagacacactcggtgaacttgagctccggaggcagtttctagttttcaaaaaatagaaggaaacaagcacgcgtggagcatttccctcatattgcctcctgcatgcccacctgcccacctcagggcagtccaagggacagggttaggttgtcttgcgctgtcaggggcctgccttagggggtttaaagccctttgcccagcggccatgcacagacttgctgactccaaagtcatcaagcaggccctaaacagcagctggatctctctcagccagagcattcctcctctctgctctgctctcagccaagccctgggccctgaagcccagaagcttccaagagccaccttctccctgcttttctcagtttttgcatccatgaggtgaggacagttcactcaattccaacttgaggaataattaataaaaaggcagtaaactacttcacacatctcaaaacacagtctgctctttccacatagcaacaactgccaacttgcaaagaaaaggctccatgggctgtaacgcagcctctctggtggcccagacttagggaggacaaatcagattgctccttgttatgaatgacctcacattccatggtgacttccctgctcaaggtgatggcccaaagctgcaatgcttgtggtcagatagatcagaaactttgccagcgaggactgcctaggaatgctggttagccatgtgaaacattctataccccccttggggggttttaaaggccagtgagaggttaaaataaaagctcagtgagtggcccatgagagcccattgctggggacactctttaccagatgggcccataaatataaaaagcagatgctcctgccttctgcacaccttgtccaccccctggagtaaattattccagtggttttcctacagaacaacccaagacaaccggaatggcctgaggaactggctctgccctccagaactaggcgagttcattgcacagtgagctgtctctcagtccagacacaggggcccctgaccgccagccttcaactccaaatctaaggaagcccagactgaaagaataaagatgctcagatggccacacctactccccagcctctgctactgagaaagggaatcactgcatgcacgggcaatgacgtcccagggacatggtcttcctccctcccacttcagctcttccatactcctccagatgcagaggaaatgcatccaataacttccaaaaacacccttcttcatcagaagcctaaacccggggcaaacacaaacatggggaaaatggtttcttgggggcttctcatagagggcacgtggtcctaaaccttcatggtttcctcttccctaccaaaaagaatcctctgtttggaagtctatgtaaggccctgcaccatttgcctaattatgattccactggaccccagagccatctccactctagctgaaactcacctagttagtgtagcctaaaggcacccagagctctcctgccattattcacgcagccacctggatttctcaccatccccagagggtcttccttttagggtcctaagctcttaccctatgcacctgtgagcctgggacacagtggccacccaataagtgttggttgaggccagtactccatagactatgagaaaaggcttgaagtcatttgagagagatcttccaccgaacccaagacaagcactggccatgcctccttcccagcattgcccctgccctctgtggtccattcgggacttgctccattcccagcctctctctctctctctctctctctctctctctctttgctttcaatctttagaccctacgtggacctcgtgaacttgctgctgacctgtggggaggaggtgaaggaggccatcacccacagcgtgcaggttcagtgtgagcagaactggggaagcctgtgctccatcttgagcttctgcacctcggccatccagaagcctcccacggcgccccccgagcgccagccccaggtggacagaaccaagctctccagggcccaccacggggaagcaggacatcacctcccagagcccagcagtagggagactggccgaggtgccaagggtgagcgaggtagcaagagccacccaaacgcccatgcccgaggcagagtcgggggccttggggctcagggaccttccggaagcagcgagtgggaagacgaacagtctgagtattctgatatccggaggtgaaatgaaaggcctggccacgaaatctttcctccacgccgtccattttcttatctatggacattccaaaacatttaccattagagaggggggatgtcacacgcaggattctgtggggactgtggacttcatcgaggtgtgtgttcgcggaacggacaggtgagatggagacccctggggccgtggggtctcaggggtgcctggtgaattctgcacttacacgtactcaagggagcgcgcccgcgttatcctcgtacctttgtcttctttccatctgtggagtcagtgggtgtcggccgctctgttgtgggggaggtgaaccagggaggggcagggcaaggcagggcccccagagctgggccacacagtgggtgctgggcctcgccccgaagcttctggtgcagcagcctctggtgctgtctccgcggaagtcagggcggctggattccaggacaggagtgaatgtaaaaataaatatcgcttagaatgcaggagaagggtggagaggaggcaggggccgagggggtgcttggtgccaaactgaaattcagtttcttgtgtggggccttgcggttcagagctcttggcgagggtggagggaggagtgtcatttctatgtgtaatttctgagccattgtactgtctgggctgggggggacactgtccaagggagtggcccctatgagtttatattttaaccactgcttcaaatctcgatttcactttttttatttatccagttatatctacatatctgtcatctaaataaatggctttcaaacaaagcaactgggtcattaaaaccagctcaaagggggtttaaaaaaaaaaaaccagcccatcctttgaggctgatttttcttttttttaagttctattttaaaagctatcaaacagcgacatagccatacatctgactgcctgacatggactcctgcccacttgggggaaaccttatacccagaggaaaatacacacctggggagtacatttgacaaatttcccttaggatttcgttatctcaccttgaccctcagccaagattggtaaagctgcgtcctggcgattccaggagacccagctggaaacctggcttctccatgtgaggggatgggaaaggaaagaagagaatgaagactacttagtaattcccatcaggaaatgctgaccttttacataaaatcaaggagactgctgaaaatctctaagggacaggattttccagatcctaattggaaatttagcaataaggagaggagtccaaggggacaaataaaggcagagagaagagacagaactaaaaatacgaggaaaggagagtgaggattttcattaaaagtctcagcagtgggtttcttgggttatttaaaacatcacctaaataggccttttcttcctaattggccatcaaattaaagcctatcctttctcaagcaggagctggtattgtagggagtggccgggtattctgggctgggctcttctggagtagggggtcagcaaacattgtctgcaaagggccagatactgaatccagtactttcagtttggcgagccgtgaggtctctgtcgaaactactcaactctgccgtcctagcacaaaagcagccatagacaacacacaaacgagagggcttggctcccttccaggaagatttatttaacaggctcccagctgaatttcactcacaggacacagtttactgatctctgttctagtgagtgggtcaaaaagcatatgcatccttatccgtcaactcatcagctcttcctcaaggcaacctgaggccagacaccaagaaaccaagcgtatctgctctaaaatgacttgttcctggggaatgccttcaaccaaaacacagctagtatttctatgccccaaatccaatcccagtctttcatgatccatgccggcggttgggtggggaggggaatcattggttgggggaagggaggaaaccccacctccagcccccgccaccgggctccctgggcacccagcaagatctggggctgcagagaacagaagagctggtgcacttaatccagctctgcccttggggggaggaggacctgtgtgtcaggctctgccatgggaacgagtgtaaaccgtggctgtctcctgcagtgagccaccgcggcaggcacgttgactgttttactgacatcactcaaaagctaaagcaataacattctcctgcgttgctgagtcagctgttcatttgtccgccagctcctggactggatgtgtgaaaggcatcacatttccattttcctccgtgtaaatgttttatgtgttcgcctactgatcccattcgttgcttctattgtaaatatttgtcatttgtatttattatctctgtgttttccccctaaggcataaaatggtttactgtgttcatttgaacccatttactgatctctgttgtatatttttcatgccactgctttgttttctcctcagaagtcgggtagatagcatttctatcccatccctcacgttattggaagcatgcaacagtatttattgctcagggtcttctgcttaaaactgaggaaggtccacattcctgcaagcattgattgagacatttgcacaatctaaaatgtaagcaaagtagtcattaaaaatacaccctctacttgggctttatactgcatacaaatttactcatgagccttcctttgaggaaggatgtggatctccaaataaagatttagtgtttattttgagctctgcatcttaacaagatgatctgaacacctctcctttgtatcaataaatagccctgttattctgaagtgagaggaccaagtatagtaaaatgctgacatctaaaactaaataaatagaaaacaccaggccagaactatagtcatactcacacaaagggagaaatttaaactcgaaccaagcaaaaggcttcacggaaatagcatggaaaaacaatgcttccagtggccacttcctaaggaggaacaaccccgtctgatctcagaattggcaccacgtgagcttgctaagtgataatatctgtttctactacggatttaggcaacaggacctgtacattgtcacattgcattatttttcttcaagcgttaataaaagttttaaataaatgg

SEQ ID NO: 940 - DNA, 32744 bp, Homo sapiens
  source 1..32744: mol_type = other DNA
ggagggggcgaggatggggagcaatgcaaaggtaaggccaggttaccgcggctcggccccgagtgggctgcgaccgggggaggggcgagagatacatatgtatttctgtctccccagcacacccccttccctctaagcgatggctgagaggcggtgcatgcagatggggagtaagtttcctgaaggggagggtggatgcacgcgcgcagcccggcgctgcaaatttccactggggagggagaacggctggatgcggagagtttggagttgcttgcggcggagggcaggaaggggagcagggctgggaaagggggctggcgggcgctatatctgggagtaagtttccagcatcaggagagcctgcacgcttgctcactagtaagtttctggccggggagggcgcatggggaggaggagagggaggggtgcatgtatatagaaggggggaggggggagcagatttcctgcggggaggctgaatgcatatggagagtagatttcctgaagggagggtggaggcgtagacggaccgagtaagtttcttgctggggtggtggaggaggtggtgggttggtgctttggaaacccaaagcttcctaccctgggtgggggagcacactcttgtcggggggacgaggggccaggttccctgctggggagaggggcttgcatctggggagtatgtttcctggcggagcgatatttgtttacaggctgagggcagtacagtaagtgagtagcgctgagagaaggcggctgacataaattaatattgaaattactccatcagctctgctcgccccccatctcaccccccaagcggatactggtcttctcgtcggattgcccatgcacttgttgcagaaacagccaaggtaggcaagaagcttattaagtttcatttttaaaaaattagtttggggatgctcctcgagaagacgggggtggggcgaagtggggagggaagagtggggagacagaaggagaagtctcccccccctttactttcactatgcaagcaggccttctcccttcttcccttcttccctctccgggctgcacagcatcccagcaaagggggagggatgaggtgggcgctataattggcaaccctggcttaaaggtagtgatggtgggcttgcatttgaggttgtgatgttataaaggcttcattctccagctaagaaaccgcaggactctgccttttggggtttttgacatgatacatatgtgtatgtatacgcgcctgcgggctctgtgggggctgggtactccccagaagttagtgtggccacccagatgggagaaatgtgtaagggggtaaacctgttccttcactccccaacttcagtttgggagactgggaagttactgccggtggtcttaagaaacagatattaaaaaccaaccaaaccactccttcaccagcggaggccgagagcacctggcaggcagcctctggccagcactggactggagcatgtgcgcctgccatccttaggttacaagaaaacgctttctggttcctccgtgtgtcttctaccggcctgttagagccagctttgtggaaactcttccccagactagacgcagctttggcaagtgccagtactgaaggggatggcttcaattcagcatggcctgggctgtcttgtgagtgcgtggaagtcgtgcttaggaatgaccgcccctgtagtggctaaagagttcattaaaaaatatctcctgaaaaccggtccaggtgcacttttcagcaggtcattgaggagagttttaagaaggggagttttaagttgtcccagttagcacccaccttctgcatcactgacccttttaagaaaggagtttggcgataggaagtgtggtgttgatgctcactgactggagaggataacagcaggagtcctcagtgcttaactagttaaccagcagcctttgcctctccttgcctctgttttcttggtcctcagcctactggtttctgcagaagagttgtaggtcttagctgtcagctaccttgatgatgctgggagttttaactttgctaggataattttagcatctcgggtccaacccggagacgtttagtagggttagggagtagccactaggcagtggggttaactgaggttggttaagctttctgcaattctgtagacaggctctgttctagcagggtcgagaaaaatgggttttaaaaaactcgctacacattgctgatggagagtgctttttttctttcctaactgtcgtcagatttccagattgagggttgatatttggcagtttgagagttgagttagttgggaattaaatattattgctgcttatcaaatgttcctaactaggcattagttaagcaaattagctattatttttacctgatgaaaatctgagtctggttgttgtatttgctgggagggtaaacaaaatctttatgtatgttcattccagggtggaattatttacatgcctagcctcagagccaagagcagtcattcaggtttttttccttatatttatgagatttattttattgtcttgctttggccattaatcaagtcacagtagttttttttttttttcctcttctaccgagaatgttcttgcggtaataaaggcttgaaggcccatgaatcataattcgttctttttaaaatattgtggtgattgtcaggatctgatttataggaattgatacccggagtgacacacctctctgggctccgcccttttaggcatgtccattttcgccaaaggattgtttagaagccagcttgacatcccaaaaagagcatttcccttctgctgtatgagaagattaattttgcaggttccatagtaaacatgggtcttttcacagcttggtaagcaggcttccacatagcaggcatgtgttattatcacatagcatttatgtgagcttgctgtgaaaacagttgttctatgaactgtgtggaaagtactcagttttgcctcctataaccggcttgggcctgtggtttttgttgagttaggaacttaaagtgtaaaagaggagacagactgcagtgttctttgctgcttgtataataaaatgtgtggtcacaaaaaataaagcttgtttatgattttctttttctccttctttaatgggtgggttggttataataaccgaaagcgttatttttttgacaaatgtaaggattctctgtgaagctgattagccaggaagtgttaaaattgtcttgtgttcaatagttggcttaagtttacagtattggtaaagtgacaaagaacttaaagtagtttgatgctcaaggctaggggaaacatcactggaaagaaaggtggggaaggtaccaatttctagccatttctgggctttggattttttatcttaaaagtgcgtggtttgatccgtgagttcccttccggctctgaaattctgtgtcttgtaagcgaggtctccagaggtcttgacagtctcttcctgagccaacggccaattgcttcatggacttgggtgagctgattaacttctgtttttgtcttctcatggagaaagtggatttgatccttggtattccagaaaggtctcttgagtggcctggtgatcttgaccatcaaacacaaggaaatacttatgaataaatgtctgccagtgtcttggacaaaaaattctcaattctatgcactaacagagagtgcagcatgtacatatcctaggtaccaaaaataatttctgttcatcttagaagtttcttctccagccagttggttaacttgtctaatccttggtcaagtctaaggttaaccaagctcttattcccaggcagcaggaggagatagctttggggagaaactggagaccagaaagcccagtgtggctttgcctgctttctgtgggtaattgggatttggctgaatatttgtgataaggttcataataatgatatagtatcatttttatcaccaggattctctgtatttcactatgggcatttttgggagaagctcttgatgtttttattgactttggacattgccatgaaaagtaaggatttagggctgggcgcggtggctcatgcctgtaatcccagcactttgggaggccgaggcaggcggatcacctgaggtcaggagttcaagaccagcctggccaacatggtgaaaccccgtctctacaaaaatacaaaaattagctgggcatgatggtgggggtctgtaatcccagttacttgggaggatgaggcatgagaagtgcttgaacctgggaggcagaggttgcagtgagccgagatcatgccattgcactccagcctgggtgacagagcgagactctgtctcaaaaaaacaaaaacaacaacaacaaaaaagaaaagtaaggatctaggcaagtggcttataccccaggcggtataaatggtgctcatggtcctgctctaaaggcggttgaattcagctcattttatttccgacctcataaaactgtgtggctgagggaggaggaaggattaaaatcatctgggatcttgtggattaatgatatttctgaatttgcatgttgaagggaaaccagtaaaataaaggagaactaacgaatagttgatttcttttgtggagagaggaggacaagaacagctggattccagttactggcgtgcgttgccacaagggtgctgtgggcatttttaaggaataatatagtctcagtaacatgagtttgaccccagggctctcttaataaatcttttcttctgggctaaagaaaacacacaacaaaaagcctctgtgatattttctaagaattttaagttctcagagtagctgcttgtagtaatttggtttactgaagaaacagatgattcttggtctttcatcatggaagacgatgagctggcatggggtagcatatgctgagctgttggggtttggtttagcaacataaacatttctttttatatgtttgatagagcaggaaggggacaaagaacccgtgtgcctaaataacagtgataactctgagctcaaagaacgagggttttgtttgtttgtttgtttctttgagacagcatcttgctctctcactcaggctggagtgctgtggctcaatctcagctcactgcagcctctgcctctcgggtccaagtgatcctcctgccccagcctcccaggtagctgggattacaggcgtgcaccaccatgcccagctacttttaattttattttagtagagacagggtttcaccatgttgaccaggctggtcttgaactcctagcctcaagtgatccgcccaccttggcctcccaaagtgctgggatgacaggcgtgaggcaccacacccggctgcggaacgagggtttttttaatgccataagcagccctggtttctttcatacatgcggcagcttcttattgaggacttactatttgccaggcactgtgttaaagctccagaaatatattgataattgaaagagacataatcatctccctctacccatacccctacccttaccacttcacttacagtccagaggcagacatgtaaagaaatacagcttgccaattgtgatcagtgctctgatgaaaccacaagtccagtgacttggatggatttcattagagtagcctggaaaggcctctctgaggtttgggggttgggggagacagcacatgaagcagaggagagcctgtgcagaaggactttggttttggagaactcaaagaggcacaggtggtcaaggatgaaggagggagggcagcatgagatgattgtgcaggactctctgggctttgaaaaggtttacatttcatttgaagtgtagtgggaagccattgaaagtttggagtgggactgggcacggtggctcacacctgtaatcctagcacttcgggaggccgaagcgggtggatagcctgaggtcaggagttccagaccagcctggccaaaatggtgaaacactgtctttactaaaaatacaaaaattaggctgcgtggtggcggatgcctgtgatcccagctacttgggaggctgaggcaggagaatcacttgagcccaggaggtgaaggttgcagtgagtggagatcgtgccactgcactccagcctgggtgacagagcgagacttcatctcaaaaacaacaacaacaaaacaaacaaacaaaagaaagtttggagtgggaagcgacagcccctaattcacgttttaagaagattgcattggtggagaagagagcagagaaaggcagagcacagtaaagaggcaggtggaggaggaggcgaaggaggtgcatggagaggagtgggtgggtgtgagatgctcattaggagtagaatgggcagggctgctgtggggtggggagaagcatctagaactccgaggtttctggcttgtgcagttgagtagatggtggtgctgtttcctgagatgaagaaagattgggagagggaggcgggcagaatcaagatattttagttggggcaccactaagtttgaggtgcctattagactcaaagtggagatgtcaagtagggtaatctgatctaccacctagcacgagataaaaatgtgggagccatcggcatggagagaacatttaaatgcaggagagtggacagaatgccctaaggagcccgtggagagagaagaacaggcagtgtgaaggaggtgtgtgctgtgtgtgtgtgtgtgtgtgtgtgtgtgtgtgtgtgtctgtgtgtgtagtgtttcctgaggctgataaggccagaaaaatcaccattggatttgtttcatcgttttttgttttttttttttttgagatggagtcttgctctgttgtccaggctggagtgcagtggcgtgatctcagctcatgcaacctctgcctcccatgttcaagtgattctcttgccttagcctcccgagtagctgggactacaggcatgtgtcaccacgcctggctggtttttatatttttagtagagacggggtttcaccatgttggccaggctggtctcaaactcctgacctcaggtgatccacctgccttggcctccccaagtgctggattacagatgtgacctactgcaccaggccctgaatttggcaaaatggaatctgtctgtgacttgtgaagaacagtttcagtggagtgaagggttggctgggaccacgactggagagagttgggaggggatcgtgagggaggagctgcggacagcccgtgtagtcaactctttggcaaaatttgatgatgaaaggcgaggagcagagaaacggagtgggagctggaaggatgtgcacaagggaaagaggttttttggaagtgttggtaatttgtgtgctgatgggaaagatcagtggagagggagtgactgatcaagagaaacgagttgggtcagttgagcaaaaagcccttgagaaggtctgaggggaagatctggcctttgtaagggggtgggggatacttcaggaacttgctccatcatgacagggaagaaaaactgataagggggcagatgctaaggagtgggcaggcaggggactctgtggaggaccgagatgctctgcctccccaggctgaggctgccctgtccctgggaaggagtttgggcttaggacttgataccagccagagactcaagggttaagactgcatcagaaatggtactgcatttttctgaacatttgactgcgttactgagcggcacagaggaaagagtgaattctttagcttggagaaaagagtcttcagttaaagtaatttgggcctcacattaaatttatttgaaaactatgattagaaaaagacttctgtgattttcagccctgttcagagttggtgggtactgtcataggttttgagcaagaagctcaaaagaaaaaaaagcaaaaaaaaaaaaaaagcaaaggctgcctgttgtttaggttgtctttcacaaaaaatatcccatggactaccagcctcggtggttcccagccatggggtctgcatgggaggtgggtggaaaaggagagagtcagagctggattgagatccagctctacaccaaggctctggactagtcgacctccgagcctctctacatctgtaaaaagagggctggtaccatcttcacctctcctcttcaagttgtgagagggaatcagatcatgtatggaaagtgcgatgtcaacggtaagaggcatagaacagaggcagcagtgaggcgacttgatcttcagccaggtcttcttttcagatataaaatctgacagccagcgaaacatttcccttgtccactcccactgttgttccctacgtgtagctgccttctatttggggttttcaagttctctgtgatcctttagcaaaactgctcttcttgtcggaaggctggcctcagaaatgctggctgggcagtgccagtcaatacaggttcaaattctgattccatattcagaatctgggacctgcccacccaaagggccaaataaacttggtttgctccacaaagaatcctgtgaactgggtgcaggagaaccttgaacctaccccaagaaacccgactgaggttctacagtcttagccgtcttcatttgcattcagtgtttgttttgcaaataaggattgtgctatgaagctgaatctacctaaaagcagtcattagcccttagtcttactgtgtatgctggaaagtcaattctcattttaaaaagatatccagtgcttttcactaatcgggctcctggcctctgcctaagaaggtgaagctttatttatttatttaaaaatgatctttattatgaaaaaactttaaacatacacaaaagcagagaggctagtataatgaactctcttgtactcatcacctagatttagcaattattgagattttgccacacctgtggataatggggcttcttctgtatttgtataataaatatgtgtcgttgattttgaaaaacagtggaactgatagcaatttggtttcatagagagaaggaagaaatcaacgaaaaatcagagagagaggaaatggaggccatcactgaaataactcgcattttgtagttccaaagcctctttgacatatcttatttgtgttctgcaacaaccagagaaggtagatatcctcattttatagctgaggaaactgaggctcgagaagtaaaattggaaaatataaataaatgatcaactaagagtcacctgttcagccagcatccaaagccctgatttaatgccacaatttgaatggtttccaaattttgtgcactctgaaatagataatactatacagcattaaataaaagaatgtggtacagaatatatgtaaaagatcgtggaaaccaggaagatcatctgggtgttttgggcttacaactccaatgagcttagttggaaatactcagatgatttaagcatgtttttggcatgacatttttgaaaacttaaattgtttgcctccattattctggagcacaaagctttaaggctgccttataatgaaggccaagacttgactttaacaaattgggcagctatttgggcagctatttgccatctgtgtcctactgtcagctctgtcccttctgtggggcccctcagcagagggacctgggtggtctagtggtcatttctagatggtgtggcctctagcccctgggctctgactttggagataacagggccctggacagcttgctccctcagaaagaatccttcctgagggcctctaggggtctttgtcattacagaggctgctcctagggcctcccttggtctttgggaaactgcccccaatctaactcctttgaaagattttttttttttaaaggaaaagaaaaaaagctggagttgatgcccaaggagttttaataggagtgtcgtttgagttccctctgttgtcattacaataggagataccaagctcccttaaattcaactgaaggacaccagtaatgaggctgattctgaagtattggggcttgagttcgcttttctttgttaattgggtgaatacatgcgagctgaggggttttcagggggagccacagtaagtaaggacatttaggggcctctttccttttgaagagtctgagcttctttagaaggcagtatggaattcaaacctcgcaaacgctcattccttaagtctttcttgatggctctgtgtgcctgggcctggccagggcagtgggtgggctggaaggggctgttcctgggctcctgctgcccttggtttataaggctgctgctgtcatacttgcagtgggacgtgtctttcacccctctggactgggagcttggggaaggcagaactgggtcatcactcatttctgtaccccccggcctctagcacagagcctgacactagttagtgctgtaaaaatgcttacttcagaatcagctgggtttttcttttcttttttttttttaaacctctggttttctcgccattggttcttaatggaaggagaaatccaggcttctctgctaccaggcccagtccttgcagccactgaagaagaccagacctgagaaatattttcttcccccttgccttgccttggccttgcagcctttagctggggtggtttaactgagctctcgaatgcaaatgctgtcccatcccccattccttttaataagtgacattttgttaaatcagttattcaaggccttatctatatttctgtctgtgctggcttagtcaaaataggaaagagactgaatattagatttcttcacccaccccctcctccttcccccctttgagcaactctacgtaagatttctgatagaggcggggtgatgtgtccttgaagaagtaaatgctgcgtgcagaaaaaatgtagagggctttgacttgtagcaaatgctgtttttcagcagctgtgatttttccatttttctttttctttctgttttgattagtggaactcattgtgctccagggttgggattgcactgggggagggtgcagagggaacagcatttactgggagagctcgagttggggaggggaaaggagagaagggatttattgaaaatatatgtctacttctgctgtgataaagcggcaggcatgtaaaaatgcaaccgggaaatcattattgtggtaatgtaggcagagctcggctttctcattaacagagcttagcgcacgtggaggagggggcagcagggctactttgagagttggggtattcaataatagcagaaactcaggggattgtctccatccccgcttctcaccccctccagctgccttctttctttctccaatcagtttgtaaccttttaaaagctgcttgttggattttgtgggctccttcctcacccctgccaccccaaaatgctgtaagaactgtttaatttttaaagttagagggaattaaaatacattttctcttgggaatttgaggagaattttggtaacatattgtgagtcagagattggatatcttttacctcccagagcacaccaagaagagcctatttaggggctcaggaatttgcataggccatggggtatcagcattagggctccagatcgctttagtagtagtaactgctatttatagaaagcttactatgtgcctggccttgtgtggatattttagtcatttcattctcctacaattgtaggaagcagatgtgatgtccacttcacacttgaggaaactgaggctcggggggtttcagcaacttgtttaaggacaggtgctgcgtggcggagctggtatccaaactcaggacccgctccaaagactggctcctgatccttagactatgctgcctttagaaattgcctagtcactgtatacttgctatgtacagacctctagactctaagaacctcagcaaaatatctagagctgcaaatgaggcctgccgttgacagctatgggtagagtgctcaggatgtttaagagaatctttcctgagttcctggagtgagctgttattctaaggaaggtcaagggtctcatagccttgttagaagagatgagtgccctgcccccatccctgccaggccacggtgggtggctttgctgacaacttgttcatcaagcatttattgagtgcctgccatatattaggattgtcccaatggctggaaatgccaggacaaataagaggagctcagagtctagtgaaggaccgtcatgtgaacatggaaatacgacacacagtgatgcccaccagaaaaaggcagaatttctgaagaagttcacaggacatactgtctggagcagctaggcttatccctctgactttgtttgggctactataacaaaaatgtaatagactgagtggctcaaataacaaacttttatttctaacagttcagaaggccaggcggtccaagaacaaggcaggggcagatttggtcttagatggtcatcttcttaccgggtcctcacatggcggaatgggccagggtgccctcggagtccctttgtttgtttgtttgttttggagtcttatttgtttatctattgatctatttttgagacagagtcttgctctgtcgcccaggctggagtgcagcagtgcgatctcagctcactgcaacctccgcctcccaggttaaagtgattctcctgcctcagtctcctgagtagctgggattacaggtgcccgccactgtgcccagccgactttcagcttcttaagggtataccatgtcttatttattgtgtccccagcacccatcctggggcctggtacgtactgtctcagagacagttgccagatgatgaggctggagaggtgagcagggattgggcagggagaacccgatgtcacgttacggagcgtagtcctgaccctgtaggcagtaggggagtcactgaaggttttggagttaggaagcatgtgttggggaacggaatccagtctggaggggttgagtctgcaggccaggagactacttaggaaagtgttggaaacacaggggcaagtggcagtgatgttgaaggagaagcattgccatctttctacggcatggcctgccatttctctctccatctcgcctgctctttttcagtctctaagaggcactttcacttctgtgtctgtccccttttcttccttgaggctcctggccatgtattctgcgacactccctttccactctccactctgttggtgggctgccctccttcccctcccctcccatcctgtgctcacctgtgtgattcccttcagggcaggccgtatgctgtgtcctcccatatctaaaccctctgatctaatctgcacagaagcacagaacacagagcctggggtctcagccttctgtccttctcaactcgtacctgctccttctgtgaggacacttttggggcttaaatttaaaaacttggaaagagttttaaaaaggcaagtagctgatatgaatctagtcttaaccaggatggcagaatttggaaaagcacaagggggttattttctttcttttttcctttttcttttttttttttgagacagagtctcactctgttgcccaggctggagtgcagtggtgtgatctcggctgactgcaacctccacctcccagattcaagcaattctcctgcctcagcctcccaagtagctgggactacaggtgtataccaccacacctggctaatttttgtatttttagtagcggtggggatttgccatattgcccaggctggtctcgaactcctgacctcaggtggtccacctgccttggcctcccgaagtgctgggattacaggcgtgagccaccgcccccggccagggggattgttttctttaggaaggtgaggcaatgtgctctggccatggcgaccttaccttgtatatgttgggggacaggatacattttaaaaagtaacagctgcaagccgctcacggtggctcactcttgtaatcccagcactttgggaggccaaggtgggtggatcacttgaggtcaggagttcgagaccagcctggccaacatggtgaaaccccatctctactgaaaatacaaaaattagccaggtatggtggcgggcacctgtaatcccagctgctcgggaggctggggcgggagaatcgcttgaacctgggaggcgaagattgcagggagctgagatcacgccattgcactcgaacctgggagacagagtaatactctgtctcaaaaataaataataaataaataaataaataaataacagctgcctactaagtgcagatgcacaccatcattttaggtctgttccccctttaaccctcagaacaactgcatgaggaaggcattcttatccttattatacaggtggggaaatggaggcacaaagaaatgcagaagctcgttcaaggtcgtatggctagtaaattgcagggcagggattcagactccggaactcagacctgggtgactgtaaaagcaggttcttttcccccttgcttatcctacctcccatttcgccttaccagacagcatgacttgagtttccttcaaaaatatgactatgataatatggtggaaggaacaccatgccaaccctctggggctattcgtggatagcgctaactcttggagcctcattttccatgtcctctcagtacctttgttttactgactgaaaaggtttattttgagagtaaaatgagatttaaaaaaatgcaaaagtgctttgagaactgtgaagccatattctttactcttctgcataatcattttctgagggggtgaaactctgtgagggtgggatctcagtgccatccctgggctttgggcgcgatgggtgcgtggttcacacacgttgttagcttccagaagtgtttggggctgaatgtgctctcaggtctgccccaaattattccacatgatttgggggaatcattggtggctgggctgcaagtgggaggacctccaaccagagctggagtgcccttgtgtgtccctaggagggtcacttcaccttcctgaacctccgtttcctgaggtggtcacatctacttggttattaggaagattaactagcagaatgtgtgtaaaaatccacacttgctaagcaagatgatgatgacgtatttatggaatggaagtcatgggctctgcagtctctggatcaggctcatcagcctttcctggtcagaatgttctgcctcacatttacaccacagtctcctgcctctaaggcctggagcagacataattgaaagctttgttagtgttaagactttttcactgaaattgtataaatggtaagtgaaagtagttcatatatatatatatatatatatatatatatatatttttttttttttttgtagagggagattgcaaataattcatagtgattatagagaatttggaaaatactgacacagatgaggaagaaaataaaaaagggctttaattcctccctgttaacattttaatatatttccttccagtattttttctaggcagtaaagtctagtgattaaaaatttaagcactgcagtcagactgcctggatttgaatccaggatccttcattcactttaaataacaataggcctgggtgaaatgaaatgagacaatacatgtaaaacatctggggctgtgcctagcagatagtaagttcttaataaatattagctatgatattatgctttcaaaatcatattagggttcttttgaatgtgatttaatacttactaattaaatattttttggaaacttaaaaaaatagttgcttattatcctttttttttttgagacggagtctcactctgtcacccaggctggagtgcagtggtgcgatcttggctcactacaaactccgcctcctgggttcacaccattctcctgcctcagcctcccaagtagctgggattacaggcacctgccaccacgcccagctaatttttttgtatttttagtagagacgaggtttcactgtgttagccaggatggtctcgaactcctgacctcgtgatccacctgcctcaacctcccaaagtgctggaattacaggcgtgagccactgagcccagacgcttattatcctttcatatggactctatgttcaacagatatttatggagtgcctactgtgtacggggcactgggtcccataacttatttatttatttatttatttttgagatggagtctcgcactgtcgcctgggctggagtgcagtggtgcaatctcagctcactgcaacctccgcctcctgggttcaaatgattctcctgcctcagcctcctgagtagttgggattacaggtgccccccaccacgcctagctaacttttgtatttttttttttggtaaagacggggtttcactatgttggccaggatgatctcgatctcttgacctcgtgatctgcccgcctcagcttcccaaagtgctgggattacaggtgtgagccactgcgcccggcctccataacttatttaactagtccctattattaggaatttaccttatttatcattttttaactattataaataatactttgataaatatccttgtacataaatctttaagttcatcttagattctttttgggcggtaaattcctaagaaggagtattactctgtcacccaggctggagtgcagtggcgtgatcacagctcactatagctttgacctcctaggctcaagcaatcctcctgcctcagcctcctgagtagctggcactacaggagtgcaccaccatgcctggctaagtttttgtgttttttgagtagatgcactcggctctgtatacatgccatccatgtctcctcaaaaaatacaaaaacttttaaagagcttacccttaattaatgttttagccgttttctggacaattcaggccacttaaacacttaggccttttttacctcccttatgccttttgaagtcttgtgtattttaattctctctctatgaaaccccagaagacattttttttgtgtgtgtttgtttgtttgattttctttctttcttttttttttgagacagagttttgctgtttctgcccaggctggagtgcaatggtacaatctcggctcactgcaacctctgcctcctgggttcaagcgattctcctgcctcagcctcctgaagtagctgggattacaggcacccaccaccacgcccagctaacttttttgtagttttagttgagacggggtttcaccatgttggccaggctggtcttgaactcctgacctcaggtgatccgcccgccttggcctcccaaagtgctgggattacaagcatgagccaccacacccggcccattgttttatgtagacaataataatttagattaatccacatacttactctttttgctgttcttcatttccttccatataagcatgcttctctctcagcttaatttctttctacatgaataactcctattaggggtgtgtgtgtgtgtgtgtgtgtgtgtgtgtgtgtgtgtgtgtggtggagggtgtctgctggtgttccagttctcccagtttttgtttgtcggaaaatgcgttttattcaccttcatatttgggagatttttttcccctggaaaaaaatctttattcaccttcatatttgggagatttgggcttgttttattttctttcagtcctttggaaatgtcattccattgtcttctggcttccttcatttctgttaaaaagtcatctgtcagttttattgtggttcttctgaaagtaacatatctgttttttctctttggctttgtttttttttttagcaattttactatgatgtacataggtgtggttctcttcatatggatcccctgtggagtttggagtgcatctgtaaatcatggctctgtgtttttggtcagttttagaaaattcttgaagcattgtcttccaattttgcttttgctgtttaatcctctcctccctttctcaggctcctgcacatatgttagaccctttcatggtatcctacatgtctctggaactcatttctgtattttctgtgcctttatgtatttttttctactgacccatcttccacagcaccagtcatttcttttactattcctttttgttgtcaagcacatctattcagttctctcttttttgaaaaacagagacagggtcttgctcactctgttgcctaagctggagtacagtggcacaaacttggctcactgcagcctcaaactcatgggcccaagtggtcctcctgactcagcctcccgtagctgggactgtaggtgtgctccaccatgcttggataattaaaaaaaattttttttttgtagagatggggtcttgctctgtttatccaggctggtcttgaactcctgacctcaagtgatcctcctgcctttgcctcccaaagtgctgggattatgaatgtgagccaccatgcctggcccttgtaattttaaagttctggctgacaacttcaatatttggataccttctgaggtttgtttttattgatcgtgtatttttgttggtttggtcctatttcctgacatgcttggtgattgttgtttgagtgctgggcattttaccgtggaaaatgtagaggctcagttaaggctggtatattttttatttgcccttacctgtacaatggtacaagaaggccttggtaggccctgatttcagagtttcatctgcttgccactgtaaaactaccaaagctctgcttaatgtgctagtgttttaatagctttttttttttctgtttggattcctaggttttagctctgtgcacagaagacttaggtgtgtgtcagtgccttgaggagaaatcgcttgcagaacattggactcatttctttggggttcacttttttttctggtatcttgggctcttaaatcttggatatgttcatagccctgaactccagtttttgtcttctcggcccagggagaaagctgctgaaagctttcatttactgctttctgttttgcctctgtgttccttgcaccagattagcaagtgtcctgagggaaaacagtagctactaatacatggctcacctcactgcacctccctttcctctaggagcctggtccctcaagtcccaactgccttgttgtatttccacaccttcaaaatgttattattataattatcttgtattttatctatcttatgtagctgttctgtaccagaggactagtttaatattcactgccccataatacctgaaagcgaagtctaatttcgtatcctttatgattaacattagaagtattttccatgtctttaaacattctttaattctttaggtgactttttttttttttttttttgagacagagtctcactttgtctcccaggctggagtgcagtggcatgatctctgctcactgcaacctctgcctcctggcttcaagcgattctcctgcttcagcctcctgagtagctgggactacaaggcgcctgccaccacgtctggctaatttttgtatttttagtaggaacagggtttcaccatattggccaggctggtctcaaactcctgacctcaagttatccacccacctcaacctcccagagtgctgggattacaggtgtgagccactgtgcctggcccatcatgtgattttttaatatttgcacaagctccctgttatggcttttatgatctactcacattttcttcaattgtcagatacttaggtcatttcacacagtttgcttttatgaataataccgccacaaatgtctttgtatatttttgctgaagcattttattcatattttaaaagtgtggagtagaaatgatcagagttgaaaatactaatcagtagtgattgtttttatgcatatagcatgtacaaaaataaaactatagaccttttctctcttggatggttcagaaagaagctttcctttttaaaaagtatttttatttcttgagaaatattcatataatgctcaccacgtgccagacaattcttttacatgctgtataatactgactttaattctcccaagagccctagggcacaggtattattactggtcctcttttttgagaagaggaatctgaggcatgagggaataggtcacttgcccatggtacagttgtcagtggcagagctgagccatgcattctgaccctagagcctgtactgttaactgctatactatactaccatgagctcatcgttctcatttattatcactttctttctaaccattttagcttatttcagggcttcctcagtcttctgttagttgggcctttttttctttctcatcgggtagggggagggacatgaaggtggggacaatttgggacagaagcttccattgacagaaggtgcatttgggacctggtctcagacatggcggctcactttatagcttgagaaggtaaggttgcctagtggcttatattgtatctattgtggggttggggggtccctggtgtgtattgagtgacaagggaatttctgctgccacctctggcttgaccggctagtgttggctgggccactgcctttccagttttgagaggaagagtaatttaatctctcttccctcccttcctccagttctacttagcgtaaggataaagaggtgtaaatagagggcccactaattggagtatcagggcagccacagggcagtagggaatgaaaggattaagcgctggtgctttggacctaataaactgcagggagtgaatgaagagtaagaaacctcagaccctgtggaacttcagttcctttttctttctgcctctctgtttggagccttctgtacttttccacatatatctccattttcctctctgtacttgtcattctattttccattcttatctttctacctacccaccttcccttttttctccatctctcgctttcctcctttctattaattgctagttatatatatgttaagtagcctgtattttaaaatgtcttctatttattgaataaattttttccatttttagtctaaaaacaagctttttagcttttgcactctcaagaaaaaatttgctgaatgaaattactcttcccttgtctttagttattgattaacattttcttctcttttcttttctttttttttttttttgagactgagtcttgctctgtcacccaggctggagtgcagtggcacaatctcagctcatagcaacctccacctcccaggttcaagccattctcctgcctcagcctcccgagtagctgggattcagttgcctgccacaacacccggctaatttttttttttttttttgagatggagtcttgctctgtctccaggctggagtgcagtggcacaatcttggctcactgcaacctccgcctcctgggttcgagcgattcccctgcttagcctcccaagtagctgggagtataggcatgcaccaccacgcctggctaattttttgtattttagtagagacggggtttcaccatgttggccaggatggtggtctccatctcctgacctcgtgatccacccaccttggcctcccaaagtgctgggattacaggcatgagccaccgcgcccagccaacgactggctaatttttgtatttttagtagaaaaggggtttcaccatgttgtccaggctggtctcaagctcctgacttcaagtgatccacccgtcttggcctcccaaagtgctgggattacaggcatgagccatagcgcctggcttattaattaacattttctatttcttctcttggtcagcagctcttaagagaaaaaagattcaactccttgctttttggagtgagggaagatggtctaatactgattttggggggcagtaggtgtgggacttgccggttttcttaagattgtttgagtttataactcatcaccagaagtctgagagggctttgagccatatttattaaatgatatcaagggagattaccaggaagaatgatgggatggggtggcagagaatgacaaggaaacctgtctctctcctgcttacaacccatcagcggcccccaccaagcagtacaagccagagtccatacagtagtccttagcccccctgaggccctgtctttctacagctctcctcctcattcctcctctccagccccatatctggtatgcgcttgcctcagggcctttgcacagccgtcctctctgctggggttgctcttccagaacctagatactcatctgcattgctccctcccggccctctttcaagtcttggctcagaagtctgtctctttctcaacagggctttcctcacctctccagttaggtgcgccacaccttcgcccgaatgacccatcccctttacttgctctgttgttccttttcttccaaaacacttcagcctgttcccgtcctctgtagtttgcttgttcattatctttgttgccagtcctccctctcctagaatgggtttgttcactgctgcatccgaagccctcggaagagtgcccagcacacagtaggcgctccgtaaatatatgtccagtgctgtgtccttgggggctcgggagggcccccagctcaacagacttttatcacatctcaggatctggataatctctttgcctgtaggaattttttttaattaagatttttatcattgtcatccccttcccccttccagttcatttaagactgttatgaaacaaaactcattatgcttcaaaatctgacagagctaaggccccggagaaagtgagaggaggcggtagcagggggtgcttccttccatttccccccctccgtggttttctcctgtggttggttcacttaggacggcccggagcctactgggttgaggtgagtagggcttcccagacctcgcagggtccatccacgggaaagtctgttgtcagccagagaagagaatgctaccttcccagggcagggggtttctccagacaccagtgctcaggatggaagaaaaaaggaagcagactggagaggaaaggagagagaagtgaggtgcattttgcatggctcagctggaggaatactgtcactagagaaattaggagtgtggtcctccttgggtgtgacttagttttcacttaaaataatgagtggctttcattcatttgttcagtaacattcacccagcgcctgctgggcacagatggggttgaagggcatgtgggcctgggaccggagtcaagtctccaaccacagctcagcctgctgcgagagggacagtgccaggggaccttgggtgtgacccagggctcagagccagtgtattggacttctctatctgtgggttcctgggaagtgggaaggcctgctgggaataattaatgtgtggaagggagggagagggaggcagggcttcatgaggaagtggcttagactcctcccagcattcttttctaaacatttccctaaatgaatccatcctcaggcctttcggagtcagggctgacctgtcctctgacttctgcagggcaagggttggttctaggcctcaaggcttcaactgttaatctcctttggagttttggtttttccatatgaacaaaggaagggagcttagtgatagtcttggatcactatggggataggccagtctcacagaattattgacagactgtcagtgtgctgtgatgtaagatgtgtgaatctgataaaagctgcctgaagagagcctcagctctggagacctggggtttcaccctctcgcaccccctccaccccaatcttggtgtctcatctgctaataaagtagcaacgcccactgatttgagtttcacctcctttcatttcctctctcctgtcttcgggtactcgggccataatgagcttcaaaaagccaacagctgaatgatcagcctctgaataatcaagtctgcagaactaaaaatattcagttacattataatgcagatggtactgataaattaaggggaaaatcattgagcctacaattgttttccgatgcattgtccctaccagaagttacatagaaaataaatgaaatgatttcaccttagtcagtctgggcctgtagcttagttgcttagaatataaggctcaggaggccaaaatcctactttgagccccacttggggattattacagcatcttgactggttacccagacttgactcctatttccggccctagatgtcatgccaagctcttaccagctgtttcccactgcaagcagtggctgcatgatacttaccttagctctagggtgtatatgacttggtgtaatcttatctctttcatggaagaaactgttcaaggtatacatacctcctaatgatggtgtcaagagtctgattttttttttatatatattaaaaagaatgtgctgggtgtggtggctcatgcctgtaattccaacattttgggaggctgaggcgggaggatcatttgagcctaggagttcaagaccagcctgggcaacataggaagaccttgtctctacaaaaaatacaaagattagccaggtgtggtggcacacacctgtagtcccagctactcgggaggctgaggtgggaggattgcttgagcctggcaggtggaggctgcagtgagccgagatggcataccacactccagcctgggtgacagaatgagacctcgtctcaaaaaaaaaaaaaagtaaggcagggcaaggtggctcacacctgtaatcccagtgctttggaagatggaggcaggaggatcccttgagcccaggagttcaaaaccagcctgggcaacatagtgagatcctgtctctacaaaaaagttagctgggcatagtggtgcacgcctatagtcctagctacttgggaggctgaagtgggagaatttcttgagcccaggtgtttgaggctgcagtgagctatgattgcatcattgaatttcagctgggtggtagagtgagaccttgtctccatcaaaatttaacaaacaataaaccaaagaacgtatttctcatttgctaagcatttatgtgccctaggtgaataagccttagttcttttttaaaaacaaatttatttatgtattttttatagagataggttcttgctacatggaccaggctggtctcgagcttctggcctcaagtgatcctcccatctcagcctcccaaagtgctaggattataggcactttgggaggctgagattataggattataggcgtgaatcactgcgcccagcccttagttcttatatattaccttggtttaggttaattgaagtaaataaacctataataatttgatataaggttttaaatgtatataatacattcgtaagtgaatttattaattcaataagtattattccagtatatgcagaattctaggctaagcattagatcaaagattggcaaactttctataaagggctagagagtagatatttttactttgtgggccgtatctctgtcctaactactcaactttgctgctgtagcacaaaagcagtcacagatcactcgtaaatgaatgagcgtgtctgcgttccaatcatacttcattcacaaaaccaggtgtttggccaggtttagcagcaggtcatatttgctgatccctggtctgacggcttccacctctttgttagagagacagctacgaacaaaatagatgtgatcatgacccacatggagttttcattctttttgggaataattatttgtagcattgctttgaaaccagacctgttacaaatagttgacaagtagctcctgggggacattggaaatctaggtaactttactgaagaaaggttctagtgaacacccatttctatttatattacccactggtgtctgtgtgggggtactgtgtttactcacatttggcatgtaggtactatttttgagttgctttcttttcacttcacagagtttcatgtttatttacatatgttggtctggattatataattttagtggctacatagtatttcttgctgagttaagatatgtcatgtgcccggtgtgtagtaggcatttgctagatgtttgctttcagtttgcagtaaaagcctttcagagttggaaagggattggtttctgcagaactgaaggggaaaccattgacttgggagaaccctaggagagatgggcctggatgatgtccgcttgccaacttgctgggtgacacctagcatcttgcagccagggaagtgtcaagtatgtatgtcagtgcaaatgtaagggacagactggagggtgaccttgtattccagagccctgctccccacgtgcagggaaagtctttgtgggatgtggagcaaaacttggagcctggggaggtttgtgggggcaagtggggaggaaaagcagccccatgcagagaagataaaaagcccagggggccggcggggcactggctcacgcctgtaatcccagcactttgggaggccgaggtgggcggatcacgaggtcaggagttcgagaccagcctggctaacatagtgaaaacctgtctctactaaaaatacaaaaaattagctgggcgtggtggctggcacctgtaatcccagctactcgggaggctgaagcaggagaattgcttgaacctgggaggtggaggttgcagtgagctgagatcgcaccattgcattccagccctgacgacagtgcgagactccatctcaaaaaaaaaaaaaaaaaaaaaaaaaaaaaaaatgcccagggggccgtgtcggtttaggtatgtgaaaggggcatgggctctggggccacactggacttgatttgactctgactctgggtttgccctttatgtgctctgtgactgggcactttcttagcctctctgagcctcagttttctttgctgtaaaatgtagggggttggttgggggctgtcatatttattccatagagatgttgtgagggtcagatgaataatccagtaagtgacagcacactgtgtaaatggtagctcttattagtcagtgtgaagtatgtgacccattcttagcttgcaattcacaagagcagttgttttttcactattattgtttttgaggaagcatggctaatcgctccagttccagagtggactttgcccccaccctctctgggcccttccctctcttcagtccaggttaggaggtaccttgtcacttttacccccatgataactcagctgaggaggtcagaccctgagtcacgagcccgggcttttaataaaatcaggtcagaacttgaagactaactgagtagtctcatgtgctgggttactcgtgcattcattaattcaacagatacacagaggctctactttgtgccacttgcacagtatgcagtggtgaagaaaatagtgatgggctttcatcaaataatcccacaaatgtttaattatggacaacggtatgagctatgaaagaaaagtgtacggagttaggctgggagaggatctctttttatgatgagacacttaatttcattagtaaccagggaatacaaatcacaatgagattccatttcttccctgttcgatgggcaaacgtgaagaagctgtgcagtagcaagcattgaagaggagataggacattatggtcatttaggagctgctggtaggcgtgtaacttgatgcagctgctttggaaaacagttgggtagtacagattgaggatcccttatccaaaattcttgggactgaagtatttcagattttggatttttttttggattttggaatatttgagatagtataatgcacttgttatatataaacaaatgcataaaataattttatgcatgaaacaaagctttgacctcagttgatgcaacatgtcatggactgaggtcaagtgtagaattttccacttgtgttgtcatgttggcattcaagaaatttaggattttggaacatttcaagttttcagcttagggatgttcaacctgtatcttgtaatgttgtacattcacatacagcatgtcctggcatttccacttctgggtatacaatcattgtgagaaacttgcttacgtgggcagcatgtatacatgacatatactaagaatattcctagtagcactcttcataatggcaaaacactggaaagccaaatgcccatcagctggagaatgggtacatacattgttgtcatgtgatagattgttatacagcagcaaaatgaatgaacaacatctacatgtaatggtttgagtgaattttagtaatataattttgaatttagaaaaacaagactttgaatattccaaacagcatatctttttattacatttgaaggtcaataaaaacttaaaactacattgttttgggatgcagattatctaagaaagccataaatgttggggggcaggttttcgaaggttcctcttatgagaaccactcccttaaatgtgtttgtgacaagctccccaagtacaatgatacagatgggatcaaggaggagtcagcttgggttttgaaggcagagtagacatttttgtcattgctttggaaacttttttttttaaataacccgaattataaaatgttagcaattggagtatgatattaggtgcatatgtgtgcattttattttatttttttcttattaccacgaatgtattttttgatcactacaaatgcagataggatatgggaaactgtggctgcatctgatatctatggtttcctgcccatgcaaggtggtgctgggagatctcagctctgaaaggctgcgtttgcagccaggtgtgtgattccttgtctcggggctgctttcaccgtaagggggacgtagatgtggctgggtgatggggccttctcggtttggttccagggttagcaagcagagctagtttagaaatgagtaagaaaggggcactttctggttttaagttttggctcaaatatgcgtactgaaactcttcctcactttcgctcttcttatttgatgagttccatggcatcctaatttgtggaaggacaaagaaggaacatgtttgtatgagagaaccagcttttcgagtagagttacggatgggctggaagaaaccaagatgagttcctctggggatggataaagcatcctgcatgaaggttcaaaaagatgcccatggctgggcacggtggctcatgcctgtaatcccagcactatgggaggcagaggcaagcagatcacctgaggtcaggagttcgagaccagcctgactaacatggagaaaccctgtctctactaaaaatacaaaattagccaggcgtggtggcgcatgcctgtaatcccagctactcgggaggctgaggcaggagaatcacttgaacccgggagatggaggttgtggtgagccaagatcgcgccattgcactccagcctgggcaacaagagcgaaactccatctcaaaaaaaaaaagatgctcacgccaggctgcttgagctgaggctgtggggctgtggagaggccatgggagaagtagggcagctgctagatgatcatggccatcctggacggcagtgatggaaggggcacagagtgcaggggaaggagttgggcagaaaggggtggagcgaagggggattgggcagccctatctcgtgaaattactgcttgagagaatgaaggatgtttcatatgtgagactctgaggtggaaggtggagcagagtagatctgcatggttccagaaggtaaagctagaagtgaaaggtggaaggtatggcaggagatttgtattttttttttttttttttttttggagacagggtctggctctgttgcccaggcacgatctcggctcactgcaaccttcgcctcctgggcacaagtgatccacccacctcagccttctgaatagctggaactacaggcatacgccaccatacttggctaacttgtattttttgtagagacagggttttgtcatgttggccaggctgttcttgaactcctgagctcaagcaatctgcctgccttggcctcccagagtgccaggattacaggtgtgagccactgtgcccggctaggaggagagatttggtcttagtataagttagtgtttttcttttcttttctttctttttttttaatgagatggagtctcactctgtctcccaggctagagtgcagtggcatgatcttggctcactgcaacctctgtctcctgggttcaaacgattcttcctgcctcagcctcccacatagctgggactacaggtgcacgccaccacgcctggctaattttttttgtatttttagtagagagagggtttcaccatgttggccaggttggtctcgaactcctgacctcaagtgagccgcctggctcagcctcccaaagtgctgggattacaggcgtgagccaccacacgcggccagtgtttctcaaactgtgatttgcaatctatttgtcagttgtgcaatcaagttagtgatcaagaccagcaattttatttatttaatttaattaattaattaattaattaattttgagacagcattgctctgtcgcccaggctggagtgtaactgcacgatctcagtttattgcaacctctgcctctggggttcaagcagttctcctgcctcagcctcccgattagccgggactacaggcgtgcaccaccatgcctggctaactttttgtattttagtagagacggggtcttgccattttgtctaggctggttttgaactcctgagttcaggcaatccgcctgcctcagcctcccaaagtgttaggattacaggagtgagccactgtgcccagccaagaccagcagtttttaaaaaggaaatgaatagaaaggaaagaggaaagtagggaaaaaaaagtctgagtggaccagatgaacatgggtcagcatttgtttcttgaaaatatttgtctagttttatatatttatgtgtatatagagatattttatgtgctgggtcatgatataaagtgtaattaattagtgagagtaagaatggaaaaaagtttgaaagccattgttccaagctaccatttaataatattacctgctgtttattgatcacttagactactatggaaggcactttgccaagtgcgctctatacattcactcattgaaatctcacaacgacccaatgaggtaggcattagtgttaccattacagagatgaggaaattcaagttcaaagagactgaatgactttcccagggtcatggagcatgtaagaggctgagcctggaattgaacctgagcccagctttctcaaaagcctgtgcatattcactaccttctactgtaggaagaaccgtggatggagctgtcctccaaaatggcctgggctgtctggaaaagggctgaaaaagcgggaagtgttcgggcagaggctgggtggccccctgtcagggacagtggaagcagaattcttgtccaccttcttctacctcagtgggagattggattggatcatagtaatccccccatgacttacatgacagcatccaagactcatcctgtaccatcactctaaagtcaatcccaactcctgggtttgattcttgattgaaatatgatttaattaaacatatttaggtttgtttataggtgagattttcttttaataagtttcctgatttttctgtaacaaatgtacatttattttatgattttaaaagttattaaaaataaaatgttttctgattctctctaataagcatgaattaactttataatttctataatttaaaaaagtcattaaaaataaaataccgcaatgcaacaaaaaactctaattaagaattcttcctggcaagtttttgagaggctgccggcagcattctgttcctcctcttgtgtgggctggggaagctctgggtggaccacgggaggcgattggtggatgggttctttgtggactggagcttcttatcaggttcctggaccagcccatcctccctgcagagaccaggatgaggcaggggccatagtttagggggcctcttttctgttttagctacaaagtgaagtgcctattgattctgcttaaagctggaaaggatctgagaaagtatctccactaaccccttcatttagggaagaggaaactaagtcctgggaagggaggtgactttgctttgccgtcctcccatctcatggatagcagaacaggagaagctcctaggtaggttaaatcacattgcttccccaagagaaagagggcgctagaggttggttgaggttgtggggagaataaagaacaaataaaagacaaatcttctaatgctaatttcattgaggaattccaaaatggaggtgaagggagtgtgatttagtggaaagaacctctgcttggcagttgggggacctgagctgtggtttcagcattaacacccagtgtgtaatctcaggtgagttacccacccgtggccattggaggacaggttaattcttgttcctcacattctgcccagtcaacaccacggcaggagtgcttgccctgagcagggtacatcctcagccttgtttccttccagagccaatgacctaatccccaccatggagttgtcattagttatgtgctgtagaactgtgggcccaagtataggacattctccaaatccgtgggtgccagccactagggaccttaaggtttggttgctgcataagcttggagtgctatatctcctcttgtagcagctctcaagttcagggattgtgtcttgtgaatccccccagtgtatagtaaggtgctgaggttctgcgcactttagaaccctaatttgttggcacatgttgggggatgggtaggagggttaattttgtgagtcgcatggaggtggggtccaggtctgccttcggacatgcaggccacaggcatgcgcttgaaacacaggctgcctgatttcagaatcgagccatgatggggagcactgtggtttgtgaggggggttgatctgaaccggtcactctgtgcctaagc

SEQ ID NO: 941 - DNA, 27968 bp, Homo sapiens
  source 1..27968: mol_type = other DNA
gcggcggcggcggcgcggactgggtgcgcggcgcagcgtcctgtgttggaatgtgcggctgccgcgagctcgcggcgcagcagcggagcgagcgccgccgaggcccggggccccagaccctggcggcggctgccgcagccgagacggcagggcgaggcccggaggcctgagcaccctctgcagccccactcctgggccttcttggtccacgacggccccagcacccaactttaccaccctcccccacctctcccccgaaactccagcaacaaagaaaagtagtcggagaaggagcggcgactcagggtcgcccgcccctcctcaccgaggaaggccggtaagtggggcgctgggctgggggctcggtcagggtgggggagggccgcccgggcggcggcagtggcgggacggggagggcgcggaaggacgcggagtcaggcgctgtccagggctgatttgcagatactgtggctccggcggcggcggccccgccgggcgggggctggcggccgagcaggatcgggttacacagcagccgcccgggggctgggggcgtttgttgggagcagcgcgtcgcctggaccccctccccactggaggctgggacgccgcctccgcgctggcccggacgctccaccgagtcaggtcctttgaggccaaggagcggagctgctcgggcccgtagtcctgaaacttcctctgcttcctcctcctgcccccgggtcccaccgcagccccgcgccggcccgcggccctcctggccccctcccccagggcctctccctgtcgccggaaggcgccgttgagtgcggccgggcgggttgagtcagccccggggcccgggcggttccgcctgcggggctggacagcgatttctgcgcttcagccgtccggcgccgctggcccccgcgtccggccacccgaccgctggagctggcggggctggggcgcgcgtcctgccgggcgccgtgggggagtgaagttcgcaaacttccggggcgcgggggtggcggctggcccgtgtgggggccccctccggcgctcggagcccgacgcctcgcgagggcgcccgcggagcctccccggccctgggcgttgggcgagccccggggcggtcggaggggcccgggggcggtcggagaagcccggacgccggctgcgcggtaactttccgtcctctcccgggacgggggccctagggctggggagggggctgcctggactcggggaggactggttccggccaaacagcgcctcgagcttgatcccctcccccgttttagtgttggagagcgcaggaaaaggctcaggacgagtgtcggggcgactcccgcgagttggtgtgtaaatgtgtgcagtgagcgggccgaggcgagaggaagcgagagcgcccgagtttgcaaagagctgctttgtgtttggtattttgagaaaatggccgaatgcctatttcagttaggaatgccgccgccgaggcaggcgctggtggcagcagcacggaggaattcgtgcagcacgttgggctttcgggctgtgcctggacggtcttcctaacaatcgttaaaattccatttggggtggcagttaggggttagggagcaattagaaaagtcgatgttgggccaaattacccaatagcttgggctgttcagccccgggacagccttcgccctctgttttctgtgatggcatttgcttccaacttttgttggtacgtagaactaaaccggtttgtgtttatacacttgggtgaagcgggttactttttgtattttcggtttaactttattttcttagaacttcttactttttttaatttgcgagtgaacacttcgtttgagaatggcaccttttagattgagaagtaacgtagcatctagaaagcccaacttgttttgaagaaggtgatcttgtaatggcttccactaggcaagtaggccaagtcaagcacaatgcaagaaagttgctgattgtcgagttgagttgcacgatgattttattcgtattgaaaagcttggaattcagtgttgtggaacttcagcctgcagaaaaataagcttattaatttttatttgtgaagttttgaataaatcaaacttcctttttcacaagaaaaggggtccataaatgttttttcttttaagcctgtggagttgtcgaaaaattaaggggctgactgctactttttcacagtagtttattcttttggagttagttgagttcatgcgaaatccaattaagttgaacaattattacaggcttgtactttccagatgtgtttgtgtacttaataaatgcactgaatggcttgtggatttctgggctttctgattcagaccattgaactgttgaaggggggaaaagttgggaggacaataatttactactcatgttttgaatttttaaaataattttaacagtaaaaatgaaggttactttttatccccaccagaacaattaaaagtgcttgaggaggcaccacatgccagtggctgaatgatgaatgagttgtgcaaacaattggtagaattgttttatagggatagtagaaatttttttttggtgattgcagtagactattgggaattaacaactattttaaagatttgtttttaataggcgatgaagtttactgagttataaagatcatactggaaaatttttaagttatgaagaattacagcgatgtggttttaagccagtaacagtagtgtttaaactggtgctcttgttttgttttgtttttaattcagaatacagttatggccacccaggtaatggggcagtcttctggaggaggagggctgtttaccagcagtggcaacattggaatggccctgcctaacgacatgtatgacttgcatgacctttccaaagctgaactggccgcacctcagcttattatgctggcaaatgtggccttaactggggaagtaaatggcagctgctgtgattacctggtcggtgaagaaagacagatggcagaactgatgccggttggggataacaacttttcagatagtgaagaaggagaaggacttgaagagtctgctgatataaaaggtgaacctcatggactggaaaacatggaactgagaagtttggaactcagcgtcgtagaacctcagcctgtatttgaggcatcaggtgctccagatatttacagttcaaataaagatcttccccctgaaacacctggagcggaggacaaaggcaagagctcgaagaccaaaccctttcgctgtaagccatgccaatatgaagcagaatctgaagaacagtttgtgcatcacatcagagttcacagtgctaagaaattttttgtggaagagagtgcagagaagcaggcaaaagccagggaatctggctcttccactgcagaagagggagatttctccaagggccccattcgctgtgaccgctgcggctacaatactaatcgatatgatcactatacagcacacctgaaacaccacaccagagctggggataatgagcgagtctacaagtgtatcatttgcacatacacaacagtgagcgagtatcactggaggaaacatttaagaaaccattttccaaggaaagtatacacatgtggaaaatgcaactatttttcagacagaaaaaacaattatgttcagcatgttagaactcatacaggtaagagaagctttctagtccataagttcagttctcttttctgattgttacttgagtggttagttaagtagtgcttgagaaaaaggactctggttcaaatccaggttccattttgctatctttgtgaccttgcacaagttgtttaacctctttgttcagaaatttctccatggagtaacaatatctaggttgggaggattatgtgaagttacatgtaaagcacagaggaacagccaagagatcttaccgtggtcttactaaagtacatatcctaacttggggtttaccttcagcaagttagactggccgtgcatggtggctcacgcctgtaatcccagcacctcgggaggccgaggcgtaaggactgcctgagcccagaagttctagaccagtctgggaaacgtggaaagacccccgtctcaaaaagaaaacagaaaaaaaaaagtttgtgtatttatttctgtgacagtgaacacatttaagatgcagtgtagtttctgaaagaaattgagggcttatataaaaaggaaaactcagtgattaaccttgcacatgcccacttaacaaaagcctcaaactttaaaacatttgacttatagcattgagttcctaaatggaacaacttgtctttgtccacaaaaaagaaatgtgagaaggtagtttttaaaaggtgggtgggattatcaccaattgaaactattttcctatgaaagcaaacacttgtagaaaatgtatttttcagacaattatgtttagggtgtttgaactgatactaagcgcaactgtataaaaaaagttgaaactttttttttttttttttttttgagacagtctggctttgtcgcccaggctggagtgcagtggcaagatctcagctcagtgtaacctctgcctcagggttcaagtgattatcttgcttcagcctccctggctcagcctcccgagtagctgggattacaggcacccaccaccgtgcctggctaattttttttttttgagacggagtctggctctgttgtcgaggctggagtgcagtggcatggtcttggctcactgcaacctctgtctcccaggttcaagcagttctcctgcctcagcctcctgagtggctgggactataggtgcccaccaccacacccagctgattttgtatttttagtagagatggggtttcaccatgttgcccaggctggtcttgaactcctgacctcgtgatccgcccacctcagcctcccagaatgctgggattacaggcgtgagtgccacccctggctaatttttgtatttttagtagagatggggttttgccatattggccaggctggtctcaaactcctgacctcaggtgatctacccactttggcctcctaaattgctgggattataggggtgggctaccgcacccagccgaaactttttttttttttttaatttctttttgtggagatggggggtctcactatgttgcccaggctggtcttgaacacctggcctcaagtgatcctcctgccacagtcttcccaagtgttgggattataggcgtgagccactgtgcatactagtcattcacttttaaattgggttttattcagctgctgttcactgtagtttttttaattggatttatttattcatttattgatttatttgagatggagtctcaccctggagcccaggcagtggtgtgatcacagctcaccacagcctctacctcctgggttcaggcagtcctcccatctcaacctccaaagtaactgggactacagatgtgccctaccacaccctaattttttaaaatttaaattgggttttaaatattgtaattgaggggcctcatttttcaaataaatgtttttaactattggtagctcatttggacatttctgttacattttcttggtaagaattggtacatttgggtcctgatgaatggatagagaataatccagtactctactcttggggtcacaaatgaatagggggtgtgggatgctgtttgcctcaggtctcctcttacaggagttggcacttgacaggactgaaccccactggtaaaggggacactgaggaggggaattgatgctgctttaagtggagtggtagacttaatttttgttttgttttgttttggagataggatctccctctgtgccccaggctggagtgcagtgacgcgatctcggctcactacaacctccacctcccaggttcaagcgattctcatgcctcagcctccccagtagctgggattataggtgcccaccaccatggctagctaattttttgtttttttagtagagatggggtttcactatgttggccaggctagtctcgaactcctgacctcgtgatctgcctcggcctcccaaagtgctgggattacaggcgtgagccaccgcgcctggccagttttttttttgagatagttttactttgtcacccatcctggagtgcagtggcgagatcactgctcactgcagccttgacctcctggacttgtgaccctctcgcctcagtcccccaggtagctgggaccacagacgcatgccaccacacctggctgatatttgtatggtagagacagggtttcgccatgttgcccagattggtctgtaactcctgagctcaagtaatctgcccttagcctcccaaagtgctgggattatgggtgtgagccaccgtatccagcgacttaatttttaaaaatttattttatttacttattttttatatcccagatacttaaaactattaactggcaggcttaaacaataaaacttgcaggtgaaattccattacaagagtgacctctgttacaggattgctaagccccagcagatggatggctcatgtgttgaatgctttaaaatttagtccagtaaaagaatttgtagtccctttggaatttgtcataagctgtgattgattgtctcgatgctttgaaaccattcgatttcagaagtaaaggtcaagcattacaaaaatacataaagtaggaaatgaaagttacttggggacacaaccccattaatcacttgacagtttgaattagacagactgttagactaaaccagccttacctacaatatcttaaatcccagccatcatatatactaaactcataaataagtacaccatattcatttagctgggattacaggtgccttccaccatgcccggctaatttttgtattttcagtagagatgtggtttcaccgtgttggccaggctagtcttgaactcctgacctcaggtcgtctgcccacctcagcctcctgaagtgctgggattacaggcctgagccaccaagcctggcctggtttatttggtcttaatgcttatttttccccagtattaccttcattctgattttttttttttttaactttttttttttttttttttttgagacagttttactcttgtcgcccagggtggagtgcaatggtgcaatctcggctcactgcaacctccgcctcccaggtacaagcaattatcctgcctcagcctcctgagtagctgggattccaggcatgcgccaccacacctgctaattttgtatttttagtagagacaaggtttctccatgttgggcaggctggtctcgaactcccggcctcaagtgatccacccgccgcggcctcccaaagattacaggcgtgagccaccacgcctggccaattttgtgtgtgtgtgtgtgtgtatttttttttttttttttttttttgagatggagtcttgctctgttgctcaggctggagtgcaatggcgtgatctctgttcactgcaacctctgcctccagggcttaagtgattctcctgcctcagcctcccgaggagctgggattacaggtgcgtgccaccacgcccagctaattttttaaaaaatttttagtagagacagcgtttcaccatgttggccaggctggtctcgacctcctgaccttgtgatcagctgacctcggcctctcaaggtgctggaattacaagcgtgagccaccaaacctggcctttattacattttaaaacaatttggtgatgtatagattgaaggttaatattttgattatgtaaattctgaaagtatctctggtattaaatggatagttctgaaaattatggaaaataaactcatctggtgcggaagagtagagacagaaaagacaggaatcacttaaattgatagtgttcaggaattacttctcatttccacttgcattagtaagtagcccagttttctgattggcttagtgggcttaattgtgtttcttgtgcccttctattctgtgctaatcttcagaacaatccattgaggaaaatagcatctgtgatgatagttcatgtttacacaggggaaaacttcagatttaaaaggctgaagtgatgttcccaaggtcatatacaagtatcatttatagccgttccacgatggctcacgcctgtaatcctagcactttgggaggatgaggcaggagaatcgcttgaacctgggaggtggaggttgcagtgagtcgagattgtgcaactgcactccagcctgggggacagagtgagactctgtctcaaaaacaaactacaagtagcatttaaagttcagcaatctcgactcactgcaacctccaccaaaagggtggggggagctggggactttcattctggttgacctctttagtttagtggttttgatatttaacttgttcacaaaatctacttttaaagaaaacctttttgcctgtatgtgtaactgaaaaatcagtaggtaactaagctttctggaggagagttatgcctagtttgtggaattacacagataaagtaatctgttgtaaagaatttaaaagcaggctgggcgagatggctcatgcctgtaatcccagcaccttgggaggcaggcagatcacctgaggttgggagtttgagaccagcctggtcagcatggtgaaaccctgtctctactaaaaatacaacacttagcctgtagtcccagcttctcgggaggctgaggcaggagaatcacttgaacccaagaggcagaggttgcagtgagccaaaatcgcgccactgcactccagcctgggcgacagagcgagactgcgtctcaaaaaaaaataataataaaataaaagaatttaaaagtaaattatctttgattcttcaagtttatctgcagtggtatttaattttttattgagatacagtttacatatgcagttcactatatattggcctgttctgaatatttcacacaagtggaatcataataagcagtctgaataatgctgctatgaatattcatgtttaagttttgtgtggacgtatgtttttgtttcttttggatatatacctaagcgtgagattgtggggcagtatagtagcaacattttgggtaattgccaaactgttttccaaattagccatgccattttacaatcccaccagcaatgtgtgagggttccaatttcagcacatccttagcaataatactgttaacatctgtctttgtgattacagctatcttagtggatatgaagtcttcatctccttgtggttttgatttgcatttccctcactgctaatgataatgttcatcttttcatgtgtttattggctatttgtaaatcttttttttacagaattccattaacataaaactatcttaattgttccaggtcataaggtaggcattctgttgctaccaactctttacagctaattcgtagctaccagcgaattacagcagaatagttatgaggaacacatttcccatctatcaccattctttttgttgttgtttgttttttgttttaagacagggtctcgctctgttgccctgtgtggagtgcagtggtgtggtcacggctcactgaagcctcggccttctgggctcaaatgatccgcctacctcccaaagtgctgggattacaggcatgagccaccatgcctggcctgttcttttttctgtgtaccaccttttccttattttattagacacatttgtttctgtcttagacaaaattgatagcttacatttattgagggctttactatgtgccagacacagtgttaaatgctctgcatgtattatttaagcttttgcaattacaggaaatgaagattctgttacttttacagatggggaaacggtgttttagtagctttaccaaggtcataattatcttgtgtttggagactatattaaaacaaattgtatacctttttttaaaagcttgttttgccgggtgtggcggctcatgcctgtaatcccagcactttgggaggccgaggtgagtggatcacgaggtcaggagatcgagaccatcctggctaacaaggtgaaaccccgtctctgctaaaaataccaaaaaattagccgggcatggtggcgggcgcctgtagtcccagctactcaggaggctgaggcaggagaatggtgtgaacccaggaggcatagcttgcagtgagccgagatctcaccagtgcactccagcatgggcaacagagtgagactccgtctcaaaaaaaaaaaaaaaaaggcttgttttgttgttgacagccatgtctaaaaagaatatacgtttcctacctttgagtcttaaattcttcagtattaaatcactggcctctagtcttcagtccctgtggcttttataatttgttttaaaaattgatgactggttgggcatggtggctcatgcccgtaatcccagcactttgggaggccaatataggcggattgcttgagcccagaagttcgagaccagtctgggcaacatggcaaaacctggtctctacccaaaaaaaaaaaaaattagctgggcttggtggcacacgcctatggtcccagctacttaggaggctgaagtgggaggatctgttgagcccgggaggtccaggctgcagaagctacgttcatgccaccacactccagtctgggcaacagagcgagaccctgtctcataaaaaacaataaaaagaaaattgatgaccttctcttaaatttttctttttagcttaatgttttttatttatttttatttttagagacaggctctctctctgtactccaggctggagtatagtggtgccgtcatagctcattgcagcctcaaactctgggctcaagtgatcctcccgcgtcagcctcccaagtgagactacagggtctcactttcacccaggctggagcacggtggtacaatcatggctcacaccagcctcatccttcttgggctcaagcaatcctcccatctcagcctcccaagtagctgggaccacaggcatgcgccaccacgcctggctaatttttctgttttttgtagagaggaggtcttgctatgttgcccaggctagtcttgaactcctgggctcaaatgattggcctgtcttggcctcccaaagtgttggggttacagtcaggggccacaatccccatgctcagcccaggctattttttttttttttttaaacgagatgaagtctcactcagcctcccgagtagctgggacaacaggcacgtaccaccatgcccggctaattttttttgtatttttagcagagatggggtttaattatgttggccaggctggtcttgaactccttacctcgtgatctaccagcctcagcctcccaaagtgctgggatttcaggcgtgggccaccgtgcccagccccaggctagtttttaaaataaaattttagaaatgaggtattgctgtgttgcccaggctggtctggaactctaccacttgaaaatttttagcataaagcaattacattctcactcagaagtattgttttaagctaacactttcaaatggtagtagattcatcatttacaagttaaaaaaaaaacctaaaaaccggtgttaatagcatcagacagttcaggtagattttttaaaaggtgattcttaatataacaaaaatgctttgtaccttatcaagatagttttttacttatcactacttaatgtattaacatgcagtatcactgtgaaaattaaaagggctgtgagaattcggaaagtcaatgttgttttcttgtcagcaaagccaaaataatgtagtcatagtttctgaaataaataacttacattttaagtacatgataaattgatctttttgccagaaataggaaaaaaaaattcttgttaaaatgtgctgagcgctgaacattgttgcattgttagtgagaattgtatttggctatttcgtgacatttaaacactcttatattattgaaattttgcaggagaacgcccatataaatgtgaactttgtccttactcaagttctcagaagactcatctaactagacatatgcgtactcattcaggttggtaagaaattggaacttttctatcattttcagtaaatgaccattttaaggaaattcttttagacttgtaaccgagtcatttacttattatttatttttaatataatttagaagtcagaatttaaaaatcagtattccgtcaatctggggattcctaacatggaatccaaaggtggacctcctgaaaatggaatttttgtgtacactttttctgggaggaggggccttaattctcatcaaatctttgaagcgttccgtgactccaacaaaagttaaactaatgtagaccaagactgattgatcttttaacccctacttctcatatttctcctaacagtataaagctgagagtcacaacgtgtggttgacaagtgtcagggattccttcttagcttctcaggtcctgaaatgaaggtttgttctgtttcaaggtttggtcgagcttttgaggactgactgcaaaagtttagcttgaaaaagaaaatgatagacaatctaggatgccaatttattaagctgtattaagagtataggactgtaacatgagagattcgtccactccagtgactgaaacaatcaccatcaccactcataattagtccctgttggccagcatggtggctcacgcccttaatcccagcactttgggaggccaaggtgggcggatcacctgaggcggggtagtttgagactagcctgaccaacatggagaaatcctgtctctactaaaaatacaaaattagccaggcgtggtggcgcatgcctgtaatcccagctgctcagtaggctgaggcaagagaattgcttgaactttaggaggcagaggttgtaagccgagatcacgccatcaagagcgaaactctatcttgaaaaaaaagtccctattgtcaaagtattcaagtggccaagttaaaaagtaatgttagcattggtggtcttgcttgaatgggtagccctgattgactcttggtgaactaccacttttactttttatttttatattttttttggagacggagtcttgctctgtcgtctaggctggagtgcagtagtgcgatctcagctcaccgcaacctccgcttcccaggttcaagcgattctcctgcctcagcctcctgaatagctgggattacaggcgcgcaccaccatgcccggctgattcttgtatttttagtagagatggggtttcaccatgttggtcaggctggtctcgaactcctgacctcatgatccacccactttggcctcccaaagtactgggattacagtcatgagccaccatgcctggccgaactaccacttctaattagaatacagatttagaatgtatatccctgtgggaaaagtatcttaaatcttgctgttacaaaagcctatgtagaaccatctcccttaagttaataattagcttagatctgtgctattcgcttgagtagccactagccacatgtggctattaagctttcgaaacattagtagtttgaattgatacttataaaatatgtacttaccagattttttaaattttattttattattattttttttctgttgagacagagtcttgctgtatcccccaggctggagtgcagtggcgcgcatctcagctcactgcaacctctgcctccggggttcaagcaattctcatgcctcagcctccccagtagctgggattacaggcatgtgccaccatacccagctaatttttgtaattttagtagagatggggtttcgccatgttggtcagcttggtctcgaactcctggcctaaagtggtctgcgcatcttggcctcccaaagtgctgggattacaggtgtgagccaccgcgcccggccacagatttcaaacaatgtgaagaaaagactatctttctctgaagcaggttagagaaaaaataaaagaatgttaaatatttatttttcaagttgatcatatggcaaaattattgtatacattggctttaaaaagtaataaaattaattttaactgtttcctttttacctttgtggtatgactactagaaaatttaagattacatgtgtgatatgcattatatttctactggacattgctgccatgagttagtaacaagacttgataataagacttgattatgtcacagattctgatttatttgaacagctatgaaggtgtcctgtagtatagttgctagcctttcttgaccctacgtgcttgtcacgctaatgtactttgagtgtttttttcctaaatctaagccattgagtggtgccacttaaccagaaacctggttttattatttttgggtgttttttggtttcattctctgatggtaatgtggatgcaatttcagactttggaggtaagcatcatgtcctgttgatagttgtactagctttttagtaaaatatttgagagctttgtattattattattattattattattattattattattactttttttttttttctgagatggagtttcgctcttgttgcccaggctggaataaaatggtgtgatcgcagctcactgcaacctccgtctcccaggttcaagcgattctcctgcctcaacctcccaagtagctgggattacaggcatgtgccaccacacccagctaattttgtatttttagtagagatgaggtttcaccatgttgaccagcctggtctcgaactcctgatgtcaggtgatccgcctgcctcagcctcccaacgtgctgggattacaggcgtgagccactgctcccggccaagagctttatattagttaactagtttttgtcttcataaatattttatgttgcatgagttctattatccccattttacagttggggaatgtagggcattgaaaaaaatacgaccttttttcctgtagaatgtccttccttctggatatgtccacttgttttctcatggtgtcatttagcttttcttctgtcctttgtattgtaaactggaaattaaatttaaatgcttgataatctttctcgcaaatgatatgcctcatttaaagtcacgtggttgacccattaatataatgttaggtcactgcatttagaatgactacatacttttatcctttcgttcaattagtaatactttgtcttgtcactgtttaaatgtttatggtgttttacaccagttgataatctttgactgaaacagttgtatttgggtttgcaaaatgttttgagttttgcctgctgtattttaaagatgatttttagtatttgctgttacagtatagcaagtattttaatggtgtcttaaaaactagtagtagccactagctattgtatgtatgctgaatagtaaaaacaagtatttgctgtctccagtcttagtactacgaagatactgagtttcagattacatattataggatacaagctcacaaataagtaattttgttgttgttgtttttggagttggggactctgctgcgcaggctggaatgcagtgatgcgatcatgcctcactgcaacttcatatgcctaggctcaagccatcctcttgcctcagtctcctgagtcgctaggtctactggcacatgccaccactccagctaattggggactattattattattattatttttgagacagtttcgctcttgtcacccagctagagtacaatggtgcgatctcggctcactgcaacttctacctcccgggttcaagctatagaatcttcctcagcctcctgtgtagctgaaattacaggcacccgccaccatgcctggctgatttttgtatttttagtagaggtgttgatccacccacctcagcctcccaaagtgctggaattacaggcatgagtcaccgcgcctggctggaactattatttttatttaaatatcgtatttatttatttattgagactgagtcttgctgtcgcccaggctggagtgcaatggtgcgacctcggctcactgcaacctccacctcctaggttcaagcgattctcctgcctcagcctccctagtatctgggactacaggctcgtgccaccatgccaggctaattttttgtatttttagtagagacggggtttcaccatgttagccaggatagtcttgatctcctgacctcatgatctgcccgcctcagcctcccaaagtgctgggattacaggcgtgagccaccacacccggccaatatcctatttctttctatggagactgggtcttgctgtgttgcccaggctggcctcaaactcctggcctcaagcagttctcttgtctcagcctcccaaagtgttgggattacaggtttgagtcactgtgcccagacagacatgttttatttttttctgttgataacgttggtgccaagggacttttaaatagctgggattgtttgaaagatattgtgatggcttgagagtctttgtagaataaattttaaaaactattttattgagatataatttataaatttaaaaatgcacaggtcttgagtgtacagctcagtgactatgctttcacctatttgattatcactcaagaacaagagatggaatatttctgctcagaaacaccttgccctttccacccagtctttcccctggatgatattctgtctcctaccaaagaacattatagaatttgtttgtttgaggtgggatctcactctgtcactcagggtggagtgcagtgggtgcagttacagctgtctaaacctcttgggctcaggcagtcctgccaccttaacctcccaagtagctgggaccacaggtgtgcgctaccatgcctgttttttttttttctttcttttttgtagagatggagtcttactatgttggcccaggctggttttgaactcctgggctcaagcgatccacttgcctcaccctaccaaagtgctaggagtacaggcatgagccactgcacctagttttagaacattcttttataaaatgttcttgagatttatccatgttgcgttattggacttcattttattgctggtaatgtattgtatgccgccattactttttacttaaaaattttctttgccggctatgcacggttgttcacacctgtaatcctagcgctttgggaaaccatggtgagcggatcatcggaggtcagaagttcaagaccaggctggccaacatggtggtaccccatctctgctaaaatacaaaaattagcctggcatgatggcgggtgcctgtaatcccagctactccggaggctgagacaggagaatcacttgaacccgggagacggtggttgcagtgagccgagattgcgccattgcactccagcctgggcagctgagcgagactcagtctcaaaaaaaaaaaaaaaaaaaatttctttgccattctctcttggtttttgttttgttttgtttttatttttaagggaattaatttaaaaacttaaattgagaggcttgtatttgtgtatttttcactgcggctttaacctcctaggctcaaacgatcctcccacctcagcctctggagtaggtggcactgtaggcttgtgctataacatgtggctaatttaaaaatttttttgtacacagggtctcactaggttgcccagactggtctcaacctccttagctcaagcaatcttcctcacctcatcctcccaaaagtgctaggattacgggtgtgaaccactatgcctggccattcttctaagaatatttttgatacgtatgtgtaaagcttgcagaactctttccccttttgtcttggcttacacctataaattcatttcggaggcataaaacagacaattggtagatttataaagaagagaacctgttactagaattgggaaaaagaatttaaaattgtttgtacagggcaaaagttaatattcaggtaggtactaattagaaaatcttgatgaatatattttaatataagcaagacttcatggcaataaagtaaaaattacgggagaaaaagaacggagcaaataaatcatgccatcaaattttaaacagaaaatttctacatcctccctttccgttcaccattccttaggtggaccctcgcaccttgatggatgcatgcttgctctatagatctccttattcatcagagttataaaatggtgctattttaattatagttattttattagtgtgtaaatatgaagagaagagataaattccacttatctatttactcatgatgtaggaaagacaggatacgtaagagtcttccccttgattgatcgattgattgagatggagtctcaccctgtcgtccaggctggagtgcaatggcacgatttcagctcactgtaacctccgcctcctgggttcaagtgattctcctgcctcagcctcccgagtagctgggattacaggcatgcaccaccacgcctggctaagtttttgtatctttagtagagatggggtttcaccatattggccagactggtctccggctcctggtctccaactcctgacctcttgattcgcctgcctcggcttcccaaagtgctgggattacaggcgtgagccactgcgcccagccttttttatttatttatttttttgagatggagtcttgctctgttgcccaggctggagtgcagtagtgcgatctcggctcactgcaccctctgcctcccgggttcaagggattctcctgcctcagcctcccaagtagctgggactgtaggcacgcatcaccacgcctagctaatttttttgtatttttacaaaatgcctccccaaattttatatttttacaaaaatgcctcccaaagttttgggactacaggcgtgacccaccgcgccctgctgagtcttcccttttatttatccatactcaaagttaccaattggttccaaaagtgaacaattataggtaacacattttgagttcttgctgtctgctccatgttaaggactttacatagattagattatttatagctcacaacacttagagagtattttatagatgaaattgaggccgggcgcggtggctcacgcctgtaatcccagcactttgggaggccgaggagggtggatcacctgagatcaggagttcgagaccagcctgatcaacatggagaaatgccgtctctactaaaaatacaaaattagccaggcttagtggcacatgcctgtaatcccagctactagggaaggtgaggcaggagaatcgcttgaacctgggaggcgggggttgcagtgagccgagatcgcgccattgcactccagactgggcaacaagagtgaaactccatctcaagaaaaaaaaaaaagaaagaaattgaactctagagaggtttcaggactttgctcaaagtctcagagtgagcaacttgcagagctcatgttttatctcccagatggtctagctctatctagaagttcttaggccttatgctacctatctttctacattctatgtccacgtatgttaaaatgtttgtctccatttaaatcattcactggagagaaccaggtatagagtaatgtagcatgttgtagaaacttgcatatttgtaaatctgttagtagaccaacatggagaagaattgtccagtcagctgaatatctaatttgactacctggataaggtgattattttatcaccaggcattttctaatcatgtaaaacttaacatctacatggttttacctaatgtctgagttttgctttatgaaaatttttagtacaatttgatatgaatttgagaatgtttgagatgaattttcataaatgtcaatttccgtttttctactatgcattccattggaccagtggggtatggataccatttggtaatatttactagagtgtgatctagatgggtatgtattcaggtagaatgtattactcttatgcctttaatttgggggtgggggttctggttttttatgtatcagtgattgtgactttgcttattttacataccatatctatttgtgtgccacttctcattacctagttcctttatgtattttatagaaaggtggggggaaaatcaagaaagttttctgaataattaccttggcctatatttttgctttaaaatagcaatgctagcgcaggaagtttgctaagtgaaaatttactcagctcttgccatgacggacagaaggattaaatttcaagaaaaagcctttgctcagactaaagcagaatttcaaaacttttgcacctaggatctgggagtatcgcccagagtgaaagatatttttctcaagatttaccataagaaatttagggtggagggagtatgggaattttattttatttttatttatttttgagacgaagtttcgctcttgtcgcccaggctgtagtgcagtggtgcgatcttggctcactgtaatcttgccttctgggtccaagcaattctccttcttcagcctcctgagtagctgggattacaggcatctgccactacacccggctaattttttgtatttttagtagaaacagggtttcaccatgttggccaggctggtcttgaactcctgacctcaggtgatccactgccttcgcctcccaaagtgctgggattacaggtgtgagccaccacacctggctgggaattttatttattgatgtatttttgagacagggccttgccctgttgcccaggttggagtacagtaacacattcacaactccatgctacttcagattcctgggcttaagtggtcctcccgcctttgcctcccaagtagctgggactgcaggtgcactccaccatgcctggctaatttttttttttttttctttttgtgagacaaagtcttactgtcgcccaggctgaagtgaagtggtgggatctcagctgactgcaacctccgcctcctgagttaaagcaattctcgtgtctcagcctccctagtaggtgggattactggcatgcaacaccacgcccagctaaatttttttatatttttagtagagatggggttttactatgttggccaggcttgccttgaactcctgacctcaggtgatccacctgccttggcctcccaaagtgctgggatttacaggtgtgagctaccgcacctggctgggaattttatgtattgatttatttttgagacagggccttgctctgttgcccaggttggagttcagtagcacattcacaactcactgctacttcaaattcctgggcttaagcggtcctcccgcctttgcctcccgagtagctaggactacaggtgcactccactatgcctggctaattttttttttttttttttctttgagacacagtctcgctgtcacctaggctggagtgaagtagtgcgatctcagctcactgcaacctctgcctcctgggttaaagcaattctcgtgtctcagcctcctgaataggtgggattactggtgtgcaacaccacgcccagctaattttttttgtatttttagtagagatggggtttcaccgtgttggccaggctggtttcaaactcctggcctcaaggtatccgcccaccttggcctcccaaagttaattttgttttgatttattttgctcaggttgttctctaattcctgggctcaagcagtccttctgccatggcctcccagagagttgaggttatagttgtgagccactgcacctggccagaattttattttctactccattaggcatttaactaaacacacaaaaaaatttttaagttgataatattcctccaaattaacatccagagcccaattgaactttgccaatatgtgtatgtcttaaagaatctctgttctttagtagtgcttgaggactctaacttgaacttttttgaagcttgtggttaactgagatttattcctctcttttgagaatcaatgtcaagggatagagaaatgttatacaaataaatatggtaaatgtaaggtgcatgatacagcattttaaatagtctttgttgttactttacatatacagttctttatattttaatcttgaatttgtcttaatctatgtcttctctcatacttttgatttgccttcaggtgagaagccatttaaatgtgatcagtgcagttatgtggcctctaatcaacatgaagtaacccgccatgcaagacaggttcacaatgggcctaaacctcttaattgcccacactgtgattacaaaacagcagatagaagcaacttcaaaaaacatgtagagctacatgtgaacccacggcagttcaattgccctgtatgtgactatgcagcttccaagaagtgtaatctacagtatcacttcaaatctaagcatcctacttgtcctaataaaacaatggatgtctcaaaagtgaaactaaagaaaaccaaaaaacgagaggctgacttgcctgataatattaccaatgaaaaaacagaaatagaacaaacaaaaataaaaggggatgtggctggaaagaaaaatgaaaagtccgtcaaagcagagaaaagagatgtctcaaaagagaaaaagccttctaataatgtgtcagtgatccaggtgactaccagaactcgaaaatcagtaacagaggtgaaagagatggatgtgcatacaggaagcaattcagaaaaattcagtaaaactaagaaaagcaaaaggaagctggaagttgacagccattctttacatggtcctgtgaatgatgaggaatcttcaacaaaaaagaaaaagaaggtagaaagcaaatccaaaaataatagtcaggaagtgccaaagggtgacagcaaagtggaggagaataaaaagcaaaatacttgcatgaaaaaaagtacaaagaagaaaactctgaaaaataaatcaagtaagaaaagcagtaagcctcctcagaaggaacctgttgagaagggatctgctcagatggaccctcctcagatggggcctgctcccacagaggcggttcagaaggggcccgttcaggtggagccgccacctcccatggagcatgctcagatggagggtgcccagatacggcctgctcctgacgagcctgttcagatggaggtggttcaggaggggcctgctcagaaggagctgctgcctcccgtggagcctgctcagatggtgggtgcccaaattgtacttgctcacatggagctgcctcctcccatggagactgctcagacggaggttgcccaaatggggcctgctcccatggaacctgctcagatggaggttgcccaggtagaatctgctcccatgcaggtggtccagaaggagcctgttcagatggagctgtctcctcccatggaggtggtccagaaggagcctgttcagatagagctgtctcctcccatggaggtggtccagaaggaacctgttaagatagagctgtctcctcccatagaggtggtccagaaggagcctgttcagatggagttgtctcctcccatgggggtggttcagaaggagcctgctcagagggagccacctcctcccagagagcctccccttcacatggagccaatttccaaaaagcctcctctccgaaaagataaaaaggaaaagtctaacatgcagagtgaaagggcacggaaggagcaagtccttattgaagttggcttagtgcctgttaaagatagctggcttctaaaggaaagtgtaagcacagaggatctctcaccaccatcaccaccactgccaaaggaaaatttaagagaagaggcatcaggagaccaaaaattactcaacacaggtgaaggaaataaagaagcccctcttcagaaagtaggagcagaagaggcagatgagagcctacctggtcttgctgctaatatcaacgaatctacccatatttcatcctctggacaaaacttgaatacgccagagggtgaaactttaaatggtaaacatcagactgacagtatagtttgtgaaatgaaaatggacactgatcagaacacaagagagaatctcactggtataaattcaacagttgaagaaccagtttcaccaatgcttcccccttcagcagtagaagaacgtgaagcagtgtccaaaactgcactggcatcacctcctgctacaatggcagcaaatgagtctcaggaaattgatgaagatgaaggcatccacagccatgaaggaagtgacctaagtgacaacatgtcagagggtagtgatgattctggattgcatggggctcggccagttccacaagaatctagcagaaaaaatgcaaaggaagccttggcagtcaaagcggctaagggagattttgtttgtatcttctgtgatcgttctttcagaaagggaaaagattacagcaaacacctcaatcgccatttggttaatgtgtactatcttgaagaagcagctcaagggcaggagtaatgaaactttgaacaaggtttcagttcttagtttgtaaggtatattacattttatattcatttatgatagcagacaaccttttaagattgctttaattagtatctgatgttgatttttaagtggcattcttttccttaggactttttatgtatacctgttgattgttgtgtaaattttagtaaatctaagagagtgtactaaaccagcaggtatctgttagcttatgtgtttaattgaaattagaaggctaagatggtataacagcattttattgctttgtccagctacaacttgtcatttttttctccatgtcttatcttcctgtttcactttagtttattcttcgttttttattgagatctataaaaaattggcttacttaatagcaaattacttgaagaatttgcctgctttatataaagttagcactttaagatttttttttttagagatgagaagacatttaaattgaagaaaaattcccccagcaatagacagtctatcagtccaagtatttacttcctgagttttgatcaatattttttatttgtgtatgttaatcgtcataaaaacagtgattttggtgtgttttttattttggtgctttaatggcttaagatgttgcacattttttttttcttttggtttctgtttatgtttttttgcctatgcagttaaatttttcctagaaatagcatttgtgttgaacagtaacactttatacatatatatatgcatgtttattttgtttggcgtctttggagggatgcttttagacttgtttgcaaaagggcagttttctttttctttgctgcagttgtctattttgcagaataatagtgtgtgcaagtttgtgagcaaatgaaatatgcaggttcaatctattgattttgatttttacatcttatatctatgccagaatctgtatttcatataacttatttatttcgaatggatgtagtaaattcacagctatcagttttgattttgcaataaataaaccactaggttgcatgtcgaacaaatttttatctcaaataccaaccatcagttttttttttcatgtgttttggtacagctaattcctaattgtagagtgttaaatgtttgaggagaaccttttctcatagatggttggtgttcatatggctactttacaataaagagaactgtaagtgatatttggaaactacaaacctggaattaggagatataattattccttcaagttttatagaatatcacttgggagattccaaagccatagctattacgcggcaaacctaggataagaaaggtagtatgagtgctggtagaccagctgcaactttcctatacagtgaaaaaggctggtgaaacaagtacagtccagattttttaaaatcatactttctcagggatctccacaaactggtgggtgtcctggctgtctgtgtgatagcctctttctataggtgaggcctcaaatgaattgcagctatcctggtgttcctatgagggcactttgtatgaaaaagggcatgtactccaaaacatttttgtaggttctttggccagttgccaaagagtgtgaaagaatccaatagaggatttttcttactgatagcagtcattcattgcagtaaaataaaatatgatcccattagggaatcttgaattctgacctcccatactccgttttgaaataaccactttatatttcattttttaaaaatctgatgatctctttgaggcaggtttcagatttggcagtacaacatgaaagattaggaaaagcattaataacgtgtgggtggaaagcttgttaaaaatctgagagtgaagtttgagttaaaagttgtttgaacatggcattgactgggaggccaaagatttaaagaagcggaagattcttctcttaagacatgaggagtaagttgtgtgataatggtatgtgttttgtgtgcatgaatggacattgtaaatgttgaattctaggctccgacaatcattgtcaacagaagatcaagctgcaaatatttatgttttaaaacttaaattataaagctagttaagtctttctaatgactagttttaatgttcatgggtacattttacctaagttaccgtttacattgtatagaaaaagatacatcttaagcacagattggttattaggaattagtttggggaagaggtttttttgtggattctttcatactgcaaagaaaaaccatttgccttttggggaattgagctaacttctaatctagtcttaagactagaatgctaaaaacaaaaacatgaaggaaattaaaaccccttattattaaattgatttgtaaaaacattgttactggaaatttattggacttgaggccttcctccagaaaataaggacttgattgtcaggcctatattaggttctgaaccttaatgccatgtatttgtacttactaaaaattgtttcaatgaaaagtacattagcagtatgaacttctggtccagttggaagtttttccatttgaaaaatgtgatgtttgcatggaactgtttgaaacttttttattttctagtccccctcccccacactggatagaatttagcctagaattttccctttggataaaagaacaaaaattgaacatgttatttgtaaattgatgtttagtaattagtgataaacttgaaatactagcatatattataagccttaatcttaggtagtcttatgaaaatgaatctcttaactatcttttgaacctgtattcacattggttttcaagatattttaagttatattttttcctcttttcagagctgcttcttattctggggctacttttttttttagttgtgtaattcacaaagggctgcatttttttttttttttaataaggcttataactatggctggatcttttgctctagtcttctaagaagggccattttattttttagagtcacttctaaagtcatgtggtaattaactttggagactgttttgcgtatgagtgctgatacaaattaaaacccaagtagacctcattgcatgtcaccctatgaatgttgacaatggaaggaataccttgcctgtagtatactgtcacttctggattgataagctgaggaagaaagttaagtttcttttttacataagtcagaaaaacttacagctggtgttcctagtttcctggttgacctcagcagatgaagtgaacagatagtgttaattcagattgaagaaattatctgaatcttggtttgtgtagatttacaatctacatgcaatattaactaaatcagatagcttttacagtttcacatgtgtacataggttccctcccggtcccttccatatccattagttattgaactttctaaactggcattgaaacattacaacaatgttttgttgcaccaattttataaacttaagcagtgcaatacgtgttacttttctgaggcaaaccaaaggtaaatttctcaaggttcttgctgccttctttagcagcatttgatggaagatcttttatacatttgtaatagataaaaataaaccagattgcaaatccttttttaaaatcctaaaccatgtaccaagtttttggtccaaattatgtaggataagttaaacttaaattgcattctattaaccaatatgagtgtatttctgtaagcatagttatgttgaaataaagttttaaaaacca

SEQ ID NO: 942 - DNA, 31601 bp, Homo sapiens
  source 1..31601: mol_type = other DNA
acgtttcgcggcgtgggcggggccagcacgcaggttgcatattttaggaagtgaggaggaggcgcgggctggagctgcggcggggtctggggcgcagagcagcggcgggaggaggcggacacgtggcaacagcggtagcagcccgggcggcggcagcaacagcggcggcggcatcggcccgagccgccggccgccctcccaccctcccgccccgcggcagccctagctccctccacttggctcccctggtcccgctcgctcggccgggagctgctctgtgcttttctctctgattctccagcgacaggacccggcgccgggcactgagcaccgccaccatggggaagggggtgagtgtccggcgcgcccggggagggggctcggggagccctcgaggggaagaggaggaagtcgggagggcgaccgcggccagcgggaggcggcggaggaggaagcggcgccgcgtggagtgggctggcagagccgcgcggcttaaaagacgacgcagtttggaaatggagggagcgcagtaacggggggcgggggaagggagcgccgaggggctggagcgcggcattgcttaggggggtgggcggaccctgggcgggggctgcgcgccccggaggccgagcgggccgggggctccgagaggcggtgcttgggaagcctcggggccgggaggagggggcttgcagcagcgggggcggccccgggactgagccggcatccctgagcctggctcccctccctgcgaccgccgtcacctccttctccttccttttccctccgccctccgtgccctgaggaaaggcgcgctcctccccttcccctggggcgctccgccggggcctcctcccgggcctccgttcccgccgcggccccggttccggcgggggcagcctccgggttcggggctccttctcctggggacgctggggcttagcttgctccgcgcagaggcggccgccctcccccaaagaaaaaactggctgcttctaagtgcgaagccggctgggcgggctggtgccagaaagggtgtgtcttcactgccctaagatggcctttaaggtatacttttgagggctttcttgggccactttccgtaaacacaggatgcaccgatggcaactggagttgtcatccgatggtggggagaggcgtgcagattttttttgaagggacgagccctgaaggaggataggcagacccaccagggcctcagggtacaagaaacccgaaaaaggactggaggctgcaggcaatacggtggtaggaatctctgccggtttccagcgtcgcggaagcaccaaagggcggtccctgaaggaaacgaggggtcttggggctggagagcggcgcggagcgtggtgggaatatcgtcacaacgccgctgtcctacatttctgtagcgaagacttgattacccctagctattacccgtgcaggagactgggccctggaccccaaatgagccaaagtctagttgagaaaaatttacacagaataacctcggagttcatggggtgaaagtgaccatgtcatgagaatacaaatgggagagaatccacttcgttgtctccagggtttagcacagtgcagacactgagtaggtctttgaaggccctgaggcttctgggtgtagacagagtgtcgggagcagagggaggctgcactccttggggactctaagggagttttaaaggaggtaattgaaaggcttggacctggtggggagaacaggcacaagtggaaatgcacaactcgcctcgcttttaaaagcatgcagcgtggagggctggtccaggtcaggtggcatcaaagagcggagtacagggcctctccattcccctgatggagtctgggttagtggcctgtgcttttaccacaccgtcaaacccttgatcatttctgtaaacatgcactttaaagctcattctttgtctctcctgccttaaaagaaaaagaaaaaagtttacttcctgagctaattttggggggtttagacatcacagatgtgtgccccaagcctaggaaggtgaagtgacttgctcaaggtcaaacggttggctagtgacagactaggcgtccctgattcttgaacagcctgtggcctcaagcctgaacatgcatttactctttaacattgagttctttatacagaactcagaacttcggatgaaacggggtatttgtgatgttgaattaataggccatggagatggtttgggtaactaagttatgtccatttatctagatgtctcctttataaccacacacaggcacacatgcacagtagtgatgcggtggtaacccacctgaatagttagtagagcttaaacccagatgtcttacaacaaaatgtatagtggctagcaaacacaagattaaattacagctgcgaacactgggatgatgagctgcttggctgctgggtggtagttagcattttgagtattctgatacattaaacattagtttacttgtgtgtgtgtttgtgtgtgtgtttgtcctgtgacttattgtgagcgtccaaatgttcagaagaatatttcatgttgggatttttccacatggggattaaaatgtgggtggagagtgactaaagccctgctgataattggctaacaaggaagcctgtgccggcagctaatttttaaggtcattgtaaatttcttcccctcctctcctcagtaccctttgtggcctagcttttgatgatatttcaggtgattttatatgtccttaaaagtctagttcctaagcatttggtaagaaaatgaaagaacagctcttgctgaatcattcctggatgaaataggattttgtccctttttttctttctgggttttattgccagtgacttggcttaaaccgtcagctaggcctaccaccggcaactgtttcactcaccaaaggtacacgccataactgtttagaaatgtgggaaagtttgtcttctcaagtgtgtaaaagatgaggagggggggtctcaccaggtctttcactgcattccggatttagtttgaatattatttaccgaaaaaataaatcatagcttatgagtagtgatttaaggaagggcagggaaaaaaggttccagtgaaggtggcaggggggatgcacatgtcagcagaaatcctggttgtatggtaatgttatcagctgcccttttggagctcagcttgaaagtgtgactaaagctcctctggctgctataaagctagtactttagacttaaagcattgtaaggcagatgcctcagagtggaaagttgcccgggcctggccgggagctagtggagcaagttacaggaagaactagtgcctagagctggggggtggagagagcacttgtgcctcaccctttgcctgtcagttgttcagcgtgtaacagttccctgcttcttaggttctttctgtacccttttataagggtgtatccccttttggtaacttactgtttgttaatttgtagtgttccctgccagtaagcttgtaacactctagtgactcaccttcgggtgggagggtaggaaagggagaggcctgcctcctaaacctgggaagatggggagagagtggtaaacctgagagcccaaaaaacaaaccaaaacaaaaaaacaaaaaaaaagatgcctttaaaaattcagttagatgtttgcccagatgagggctaacacttaaaatatacagattcctgggaatgttattcctaaattgcattcaaaaataaaagtgaactcaacatcttatagcacaataggcttggcactcatccatgctccatgccagtaccctcagtcattgttttcggattattttagcaacaaatgaacagataagtgactttccattcaaatcaggctatgttcttttaaatatatctaaacttaagaataagaaaggctttaactaaaatagctttgaaggattttgtatggtaaagtaaaattggtttcttcacttaaaaacaaacaggtttaaaagtaaaataaaataaaagccctgaagcttcagtttctcatctggcttttggatagaatgctcatcctggggatcaagtgaagtaatctatgttctgtttatggaaggagtgctgtgccagcctgagttgtggctattgttattgggcttacataggtacagtaattagagccaagagaagatcaaatctttacagactgggtttgttgttcgtcagtaagtcattagcccttgcaaaattagagagcagtttttctttcaccatgagaacatattaaggtttgaaaataatgggaaatactgttaattgcccttcataggaaagtcaagtagaggtgtcaattgacattattgcaactgttatcttcgctcaacaagcaaatctcctgtttaatagcatctttctgtctactttcacttctcaggtgaaggactttgttcgcggttgatgatcatttttacgtttttgaagtcttgcaaaataaaatgggcttttcggccttctgtgatgagagggagcctgaacatttgtgctgtgctgacttcttctagctgccgagggctctctgccagccaacaggctagaagaagaaacccgagtgtcagatcagatgggctcacagtaatcagagtggctgggtttggacggcaaagcaccaggcaaaatgtttcccatccctgccagagctgtccaattctagattacactgaaagtacatgtccagtacatgataatgtgcagtagagagaactgtaaaacctactcactcattttaaaactctccatttatatattttgggggagggatgtggaacctagtcaggtctgaactttctcacgttgctatgaattgagtgtatgagaggaagtgtgtattctttggctggagtcatagagagactgttcttagcatatgactcacctcattagttgtgctgaaatctgttgtcaggaatccacaagaagttcttcatatttattttgtgtttcggatagcagattctgttacgaaagaagtacccttcaccctacactttctctttggtttggtttttatttgcatcctgagcaaagggatttttgatcaatagacctcattcctttgttcctttgtgactttacagtgaatctctttatctggttttagacctcacttactagttcctttgtgagttatgatgaaatatatctgcacgtgatctctttccagttttattcaaaccctatttagtaatgactattggctgtctcagtgatttgataagttgattcatgatagttcgtgctttgtccttgggacttgtattgtttgggagcctgataatcagtgtaagattttgtgactcagtgggccttgctgtgtagatcggtgagctgtgattgctctttctagtctgttaccatgtaggggcaggtccctaatgcactttggggttatcctcttgtgtgtttcttttatcttccacatgatgcttccatggcaccatatttgttttattatttcaattcatgtgacatttctttagggccttggacagcctttatcctcttcagcctggcagtcattttccttcctagcctaggcttcagggtactaattgaggagtgatcaggacttactgggagttgatctggtcctctcataacgcatatgctgattattaatcagttgtctctaaccagagcaatctggtaaaatgaaaaaaaggagggtaaggtggtcagcagaaagggggagttaaggaataagtagaaagttttaacccttcataacccatgcacctaatgtagaggtagaattttccattgaagaaactgaagtttttgtctgattgttcttaataactgtaaaagcaaaaatatatctaaagtgcactgattctttacaccttttagaatttttattttttgaatgatcatggatgtacactactgcaggtagggtaggctgtcaggctcattaagaattgacatgcaggcagattggggaggaaggttaagtcatgttcttttgggttgagggaacctgctggctagaactgtcgctgttctttgacccttgctggctgctgggctgcccaagtttggatatactaaactgggctcacaaagggatctactgctttggccttggtaaattatattctccaggatgcatatttgggtgggcaagagaaggaatatgaaggcatggtggcccctcaggctcacctcctctgcagagaactgctgctcctgcagtgatgtgctgctgctggggctggatagcagccatggtactatgacagtgtcctccctcaaccccggccatcccttagccctccagtccctggctagacaattccttgcacataaactaaactacttagtcatttaggagcaaatggagatgtaataaactgggctagatcatttcttgactgttattttctttaagttttcactgttaagatcaaatgaaaaataatgccaaaggagttttttcttcaaaggtttgaaaagaattttcatagaaagcgaaaaatggcagtaatgtatatgttaattaagaccaagttataataatagcctttgtgtagtgctttgagaatacttttacatacacaattgtgttggatgatttaataatgtatcgaccaggaaaatgagaaagcacccctcccccttaccttttacattgaaggtagcccagacttggcagcctctagggaaccagcaaggtcagagtccatcacacaactttcctgctaaagtggtatttgccaaatcatgtccagaggtgttgtttctacaatcttcttggcaactccgaaatgggctgcatttggggcacttccttttgccatccttctggcccttcttgcccgtcaaaagcttttgtctgtgggctttggaaatagtccagtttttaaggtgttttatttttcagagttaatggtttcttgactaatcagactatgaaaatgccttctctaggttctttaatagttataccaagtgttattcccattttaggaatgaagaaactaaggctgacaggcaaaggtcatgtagccagcatgtggcaacactagaataaattggcagactcaacaccattagcagacctgtctggagggaatggtgggtcttgaactttcaagtaccctctaaactttttcagcaggaatttcagaagtctcaagaattctgagctccctgctggccatgggacattgtgctgatatggtgggaaaaatgcaggttgagaaagccttcgcatcctgccctgttggaggctggtgtttgggatgggtatgaaggcctttggcggtggctatagcttatgcagacctgaagcaatatacctctgggatggaagatcctgcttattttgggataatttctaaatctgtcatatctatccccaaccctgtccccattaaatggctaattgccaaaaaagaggaagcaacatcttcagctctagcaagtctcggggatgtctcactcattgtgaggactgtgaggattcggtatatatttttaagtgagtgaaccttgttacatgttttaaccttggttcctcctgtcaagaattttatcttctcatgtcttgggcaccttttccctctacccagatcaaatagcaaaatgcttagttaatctttgagaggatagaatccatgggaagcacaggatgaaatgatgacgctgtgctaagctgtgtcaccgtgggtaagcccctgcccttgctgtgactttccacttcctaaattagaatggaagggggaaaaaaaaaaaccataacccaacttcatttttatgagtggccctttagaaaatagtgtaatccgttgagtttccattgtacctttcctcagagatgctcaaaggggcgggggtgcccttacatggaacatgatgagagtgaggattaatcactcccagtcctctgggaggggggaagtgacctgaactttctaattgaaaaagtaggaagtgtgtgcccaatgcccagatgagtgggaagattactgtagttgattgaggaaatgccgtatttatcattcacccttcccatgacctttgtttttccctaatgccttaaaaaataataaggaaacattgtcctacctgattctaccactgttcatctcacgcagtgtgcactccctgactctgaattttgcagctttgagactgaggtaattgagactgatagggatttaaggatatttggttcccacaagaataagctaatattaagttattattttacttgtggagaagaactaaattgtataagctgcctggttcttctagacacacattgcctagtgaaaaaattaaaattttgaagaaaaagcagttttacttgttaatacttgccatgtgtctcacccacaaatagcctcatttaaaactttgccttacctagcatgaatggataaagaaaaaggagagttattagggaatctaaattcccaactaactttagcactgatagtggtgaagctatgggcaagacatttattttgtaagtgggggtaaaactttggaacgtgttcaaagcctagctgctctagtaatcctctctcctcttctggagtggaagatattggaagtctgagaataagcaaagcatgcagattatgaagctgaggggttataactatttcatttattgaaatatatttcaatgatattcaacttgctcagagagaatccgtgagctgtattttaaaaatcaatacaggctgggcacggtggctcacgcctgtaatcccagcactttgggaggccgaggtgggtggatcatgaggtaaggagttcaagaccagcctggccaagatggtgaaaccccgtctctactaaaaatacaaaaattagccaggcgtggtggcgagcgcctataatcccagctactcaggaggctgaagcagggaattgcttgaacccttgggcggaggttgcagtgagcttagattgcgccactgcactccagcctgggcgacagagtgagactccatccccaaaaaaaagaaaattaatacaaagtggtcacataaatcttttagagatccttagtcaatgtctttaaaatgttttttaagtgttgtgctttctcattaaaggtatgatatacctttaattaaagctaaagatataccactttagctgtggttcctttctggtagatgacctgccttttcctttttgttttatttgtccacttgtatgtgttactatttttcatttaaactctggcaccaagagctgtaccgaaagaggcaccaacaaatgtggttgctccataatggagagaatgtcaagaatgttgactatctttagacctgcttcattaatagataagatagaaactaaagaacccacccagttggaagaagttattagtcaagtagtgctgcacacgtgaccacagaagttaaaaaggtaaataatgtgtctctacatgtggcccactccagtgaatttggagaaggatttctccttggagtcttaagaggatatttttaaatttaagtgaacaatgtattttatttgcaactattagttatgactgaaacacacataatacgttttgattttcttttttcatttcagcacagtgaaattataatctggacacgagttcctaattattgctttagtagctggtaatgcacttaggaaagttagaaatgagtaaaggagaaccacaaaataatagtaatagcaccatatgtcatgcattttaagaaaattgctaatgtctactttttggccttaagttgtagttgtgggaggctgcttcagggggaggtgtctggaacaaggggctcttctgctccgctaagctttggagcaccaagttcaggctttgtgtagataagctcaaggatttttcaacaggggtgggggagtggaacaatctaaatttaaactatagaatcaacattttctttaaaaattgttccagttttcaagaggcgtaggtggatcctgtgaattatgtgataatgcacacgcttttcctacatcctgcttatgtcaaaacatttccagagactttcattttggaggttttattttcaggctacagaatgggctgggcgctcccttttttatctcttatgcaaagaattttaaggagtcttaggctgactttttaatatgggaagctggtaaaggtcagtgttcttatgtgagcactaaagatatttaaatttgatatgtaataatgtctttgcaaagcaaagaatataaacagtataaaagtactagcatttagatgtattgtatcatttaatccttaaaaacatgaaatgaggttggcactattctttatctccacgctgtggaagaggaaattgaaatgtagaagttagtaacttgcctaaggatacactgctggtaagtggtaaagcccaggattttaactcaaggctgtctgattgagaatgcggactcataagcacaatattgcactctaagttaataatgtaaagttagtttcattctttcagtagggaagatggaaggctgcagaatagggattttgatagcaaaaatctcctcattaaccccaaaaggaagtggcactggcagggccattctgaagcctaccggtagcttcagtattgttcttaatgctcttggatggagagaatgtatcttgagccaatgtattaatagtagattgctttgcttatgtagtaggcaatatatgggtatacattttcctgactattatcttaatgactattccaaattatgactaccttaaaaactaccaaaatcccctgctccagaattttcagtttcagatgaggttcataattcatggcctcacttttcccacattctcctacaggttggacgtgataagtatgagcctgcagctgtttcagaacaaggtgataaaaagggcaaaaagggcaaaaaagacagggacatggatgaactgaagaaagaagtttctatggtaagtactaggaggaatattgtattccatccttattaaaaatccatgatttttaatcccccaggcctcactgtattcttcaaagaactgctatatattaaaagagatcatagcagctgtacagatctcatctagtcgtagaggttaatgttgaacatatactttttaaaagctgttagagggtaggaaaagttattcagtcactctggcataaccagagataacagaaggaacttaggttgataccatgagtctttgcttttctctgtattatatcaaacattgggaaattcagcctctccaggcgatggaagcttccatagacttaacctgtctagaatcgacctggtcatcagagaaggcagataaggttttactagatccctgagagctgctgggtttctctgaagtgttatggcaaatagtaatgggccacggtcactcagctttagccattctccagtgaagagctgtcaatgataactgtgtggttgcaaagccacaaagcgatggtgaaaattgtaccaacttatgcactgaagaaaacatctgcactttgtttaataagcttaatgatagtaatgaataatgctattttttctgtcatttttttatactacactgtttaactattttctttgtttctgttttcccttaggatgatcataaacttagccttgatgaacttcatcgtaaatatggaacagacttgagccgggtatgttctagtttgaaagctgttgtacaaaatcctagttttccgtattatattttcccctgtattacatacaggtctaacctcaggggctctagtaagaaaatgacagacaccatctgcgtatctaccatgtgacatgcacagaatttgggcatttatatgctaccgtttcttttccctgaaactttttgaaagtagatgttattttcttttccctattttatagcagttgagagccagtaagtgggaacaccaggacttgcagttggcttcaaagccatgcttatgccttgaccttttgatgataaattttccctttatttttctacatttgttaaatagagttgaatctttcacctagttgaatcttcaacaattcccatttttgcacttttcccagctagcccattgcagtgtgttatggttatactatcatttgtttagttattctatcatttagttggaaattgttttgtacaaaaattaaagaaaccttttcataaaataggcgttatgtatccttgttatgtagaggattttgatattaaatgtgtaacaaatgttataaaagtaaatagtctagggatgtcttatttccagataatcactgaaatgtctgggaataacttgaatagcaagccaatatgtagcattttttcagtaaggcatcaagagacatgggtactgtggtattctgatatatattggtttttgtccacagttcctggttcataactcccatagcccttattacagtcgtttgttataatgttgggtgtgttagacctcagtggcaggcttcaagaaacaggatctctctcctgccctccttttcacctgtcgcaaggcaggactctaatcttgttccacttttctgattttccaggtagatagtgttggaattgaattggaggaaaccttggtggtggggagaaaccgccacacctttgctcacagaagtcatcttctgtgttgattgttggggtgtaagagtagagaagaggccgggtgcggtggctcatgcctgtaatctcagcactttgggaggctgagactggtggatcacctgaggtcaggagttcgacaccagcctgaccaacatggagaaaccccgtctctactaaaaatacaaaattagcctggcatggtggtgcatgcctgtaatcccagctactcgggaggctgaggcaggagaactgcttaaacctgggaggtggaggttgcagtgagccaaggttgtgccattgcactccagcctggacaacaagagtgaaactccatctcaaaaaaaaaaaaaaaaaaaaaaaaaaaaaaaggagagaagaacaaggttgagagcgtttttcttgacacaagcactttaagctccaagaggaggcctcgagtcagctcagaacaacatgccaacagtgactctgtgcttactttgtgccaggcagtctctagccacttcacatctcacttaagtttttattagagtcttaatgaagtgtgctctctccgacctatgcccattactcaaatgctgcgggtctatttctttacttataaaatgaggttaataatgcctaaaaaaggattgtcatgagaattaaacaagttaattaaagcactgaattcagttcctggcatgtagatagcactcaaatgtttggtaacatgagcacaaaacacagataaatagatactttagacaaaaatattttattttttttttgacttgttattttgagagtataaaagtgatcatattttcctctcttaatgagagcttatatgtaattgcctgctgtcagtgaatcttgggtttaaggcccattagaaaaatagcaggctttagtagagtggttttttccagtgagtacttttcagtcaacaggtttattgggaggtggctaaaatgcacatggaggtgagcccttccctgccagacaagcaaagaatcaagctgtatatttaaaacttggctgttaacccaaaggatttctacaggaagtttttttctcctttgatgtttgtagaggggttttttttcccctcccgacaaaatcaatacacagaaaacccaaagctcttaatttgcaaaactgaatggatttgtgaaaatagatacctttttggcagaaatgcaatttggcattaatcccttgatctaaaacttagaagaaaccaggctgaattcaaatttattgatggatcaatttaaagagttttaatctgggtgttatgagttccttgggcctattgtttgcctgaaccctgtggggactggctcatcagcagaattattcatggaggaatttgctaggttttaccttggctctctagcttgggacattttgtttcttccttaaatccttattgcaaccgtccagctaccaggtaggtatattgccttgtaagtgctggtacagtttgccttatttatattccactgcttctcagggattaacatctgctcgtgcagctgagatcctggcgcgagatggtcccaacgccctcactccccctcccactactcctgaatggatcaagttttgtcggcagctctttggggggttctcaatgttactgtggattggagcgattctttgtttcttggcttatagcatccaagctgctacagaagaggaacctcaaaacgataatgtgagttctgtaattcagcatatggatttgtagtacacatcagatatcttctccgtctttgtctcccacttcttctcaattaccactcattacttaatggttatgaactcattacttaatggttatgaacagctgttgccttcaaggctcatccattcttccttcgtttccatttcctctctctaccacccacgttgtagatgctcttacaagtgggatgcccacctgcatgtgctgctgtgagcaggcagctctgctcaggccccggccgccacccactggatggcagagcacagcgattcatgttggcacatccacctgtccagaaatgcttggtggccattcttcaaaatccacaagttggttgaaaaacaatctttgttttataaagcaggagaaactgatgcatctagaacctttccaaacgtccagttagtgatcaagtgttggtgtgcctgactccatttctgacccttcctgtgtggtctttagaaggataaataagaaaacatgagttctatatttctgaaatcttggtttctctattaaaaatctgttttttattcagtcaaaaaattaattgaatgtccctaattattgtgtagagccacgggccctaacttgtcttttcccttccagctgtacctgggtgtggtgctatcagccgttgtaatcataactggttgcttctcctactatcaagaagctaaaagttcaaagatcatggaatccttcaaaaacatggtccctcaggtaccagacgctttgtccttccccagtggatgacttgacagccccaagcatgtcagcctgtgaattagtgtgaagttaaggttttccaagtattacatgactcatcagagagatggatgtcttctaccccacccaaaaccaacctattttccttctatccaaaaagtggtagcctttcttttgaatgtaaactctgaatacaggcacaccatgtaacagcaatatctcttaaactggcgagcaagcttttgtaacttgtgtaaataaaaaagtgaataatatctttgttttgtattcaggtaattaggattatgactatttttattttcttgttttggacactaccttctctttgttggtatactaacggtgtaaattgtttcttttccaaagcaagcccttgtgattcgaaatggtgagaaaatgagcataaatgcggaggaagttgtggttggggatctggtggaagtaaaaggaggagaccgaattcctgctgacctcagaatcatatctgcaaatggctgcaaggtagctcttttattttaacaaacctcatagctagctctgctgttcgggcagcttgatttgaggggtacagtagcccatgataaggctggtgtattcacatgacatttttcttcttttcctcacatataggtggataactcctcgctcactggtgaatcagaaccccagactaggtctccagatttcacaaatgaaaaccccctggagacgaggaacattgccttcttttcaaccaattgtgttgaaggtaggccatttttgggcactttgagcatggcgtggtatttctcttgggcattaacaaaatcaaaaccataggcacaatctcttgttttattggctccatttctgagaacttgtgtcaagcacagagcagaggtgttttcctagctggcaggaaaccttgtggcagtttcccttccctccacctccaccctgcctcttctgtcaacaacaccagtctggcatgggtgttggagctgctgtcctgctactggagagaagtccctttgccaaacagcatgtacagccaaagagctggcccttaaaaagtgcttttatcaactctttttgtttttttagtcatcctatgtaattgtgtaaaatccgtggcttccttcaggttagatacaattaggtacagttctccctccccttctttttaaggcaccgcacgtggtattgttgtctacactggggatcgcactgtgatgggaagaattgccacacttgcttctgggctggaaggaggccagacccccattgctgcagaaattgaacattttatccacatcatcacgggtgtggctgtgttcctgggtgtgtctttcttcatcctttctctcatccttgagtacacctggcttgaggctgtcatcttcctcatcggtatcatcgtagccaatgtgccggaaggtttgctggccactgtcacggtaagaggcaggtgatggtcaccctgactcagatcagcttgcacgaatgttacactcttccgctatcctattctaaggtattgccaacttatgttttattctggatgtttgatatagttcttcttgagagccacatcacgtggtgaattttgacagtgagaaaacctcagcatttgtttatacgtaagataaccccaaagcatacattttgcttttaaattatcacgtggtcctgaacagtgcagtggagaaaggagaagaacttgggatcaagtagggggatagaatatggtagaatcctgttattatttttcttaatagattgcttttctggaaggaaggggaagcctcatgtatgggttccccttattatttcttcaaacttcagaagaaggttggagagatttaattttagacaaatttcttccacattaggatatagcaagaatctgtatagaattccagcctggttgagtgaagtaataatcttcctaatattttttaggtctgtctgacacttactgccaaacgcatggcaaggaaaaactgcttagtgaagaacttagaagctgtggagaccttggggtccacgtccaccatctgctctgataaaactggaactctgactcagaaccggatgacagtggcccacatgtggtttgacaatcaaatccatgaagctgatacgacagagaatcagagtggtaaggccagggttaccacacacctcagccacctgctgacttcgcttggttttttttcttttaagaaattgcatgaaatttcttttttttttttaagctcatggcagctttttctttcttttttgttttttttttttttatcatttagtgaagagtcaagggtatgggatattgattttttgcatgtcagtagaaactttaaattgccctacaaacgtgactgaagaatgcctaaaatgtgattggtttcattaattgggaaatgagatgtatcactgcagatttctatgggactttaataggagaactgagaacacagcctttgaagttaatgcattgttgttctgttgtgttttcttgcctccatcaggtgtctcttttgacaagacttcagctacctggcttgctctgtccagaattgcaggtctttgtaacagggcagtgtttcaggctaaccaggaaaacctacctattcttaaggtatgctcaagagttaactaatggagggatgtagacagcacatgagaactgccatttgagtgttaaaagtagcaaattacctttgtggtctgtgtgactgttcactgtagaacacctggagtggtctgtgcagtactttgctgtgtgtaacttacattgtgttgcctgtagatcctgatgtattataggaccccctgctccatataggttgattaaaaagggaagatgcagtaaaaatctgaccaaagtgggaggggaggagacggaagacagtctttattggtgaaaaacctaattcatctgcttttactactcttgagtttatatgttatcacctaacctagtggacagtgagagctgagggctgcagtgactccataatcgtatttgcatattaggatacagtagattccagtaactcctttaagccatttattttcctgaaatagctcagcttatcttatcttattggttcttagcttgtttactaatgatgtaaaaataagctccaggccaaaataagcccagccttagcctgtggaattctgatgcagtttgaaatgattgagattttactatgctgcccaagtgaagatgcagtctcagaaggatcatgaattgtacaaagtcctgtaggagaagaaagctatgtgaggctctctgggtcccacattctctgtgaagctgcctgtagtagttgtgggtataaactaagttgccaaagggaatatggcttggatgtaactcagatgccttctgtgatgaggatagggttcatttattctgcaaaggagattttcttggcattgaattgatgttgatttgaggataatgttgtgtatcttgaggataaaacttgagataaatgtttcatgtttttctttacctcaaagtggaaatgttctaggctttgagcatcaggtcccacaagtatcaaatctttcctgattaaaaaaccccagaaaggtagcagaagctgtattccaagtatttctggagttcggccatgttgatggcattattactaaaaagcggggagggagaagcagccctattctgcttttattaaaaatggcttttattaaaataagtggcttttatttaaaatgtcccccacttattttgtgtttctttccaaacccagccaactttcttgctctgtggagctgctatacttctgagcattgatctgttcatctgcatatgcagccttacatgttaaggttctaaaaggtttacctatataaaatttgtttacaactgaaaatgctttcagtatgtcaaaatataagtgtgtcatcatgtatcatagaaaatatgtgtgtcactgaagcatgggctttaactaaaatgttacgtggttcgattttattactgttggagttggtaatagctttcagttcacatccttcaggcccagttaattttgcacagttatgattagaatgcacagtcttctactttgcccttgacacaggcagcttgtccccagtcctgagaccttaagcattttcttacgaattctacggtaatgaaaggtgctataaatgtttaatctctcacttggtattttcagataagtaaccagaagtaggtagttgggaatagcattggctttgagacttttcagtaggccaggggaagatagaaatagactgcagtaggttggaagggtgtgttaatacctcttctagggaaggtgacaccttcccacacccttctttcactagaagctgctgtggggtggggaaggacgttggggtttgagtctgaagcactgtgaacagcagtggtcggggctagagggactcctgtcccacttaacaccgctgcttccttcttgcccatcctctgctacctctgacaagattggaatgtgtcttgagttatttttcctgttttttagtgatgcctcagtgaaattttttggagataatttacagatgatgtctctgttcacagcgggcagttgcaggagatgcctctgagtcagcactcttaaagtgcatagagctgtgctgtggttccgtgaaggagatgagagaaagatacgccaaaatcgtcgagatacccttcaactccaccaacaagtaccaggtctgaagatcgatgggtacacggagggcgagggcaagctgggggacaaagaggggaggtacatgagcaggaagaggaaatattctccctttggagttttataagctttagctttaaattttgcccttgattaccatagaatgccataatttagttgaatatcagcaggataaatgaagcctcttgcaaaacactgttgagcccttttgaatacttgtggtttggggtgggtgtgggcatgtggggaggtggctggaggtatgtgtacacaagtgttccccaatccctgtgttctgaaatttcgtatgttcttttttaatgtgaacaaatgtcaggaatttatgaatatatcatagtgctcatttttttttttttctgtagcattcaaagtatgttacaggtgtaagatacttcagagttcagaaagaagggatcttgggtcttttatagcaaatactaaatagtaagtgaagctttgttttccaccatggactgccacacatccaaccatccaatgtttatgtctcaacaatccttcacagttgtctattcataagaaccccaacacatcggagccccaacacctgttggtgatgaagggcgccccagaaaggatcctagaccgttgcagctctatcctcctccacggcaaggagcagcccctggatgaggagctgaaagacgcctttcagaacgcctatttggagctggggggcctcggagaacgagtcctaggtatgcagataacctggtaacagagtgcctgggcacgtttttatccagtaacctagtctggtagacagttaacaagtgatcctatgaacctctatgtcttgttgaccttcctctacatcttttaggggcaatcctcctatttgtttatttgccccctattattttgaaaacaataagtgctgaagaaatgttcagcgtattgggctgtgagaaacaacgtcctgatggtttgcttctgacttgtacttagacctttggtctcatgctagtcagttctgtttgtttaaaaaaaaaaatggtggaagaatatctttcttatctaacctttgttgctgtggacatgacttataagcctaattaaagttaattaattcttagtgtgtctaagttagacatactatttcctgactgccttggaatgggtgtgaatttacatgagcacttatgtgctcagcttagaaactagactaacggtaaacttttagtctaagatgctacctatttttttctaccctgacagctactgaggctgagaagttcactttacccattgtctaatgtatttgggaaagtggcatttataatactttgtaggttgacagatactacattcattatttatataatgcttcctattcttcttaacttgggtaaatctaactcatggtatctttcgtatgtgtctatccaaccgaaggattgctatcttctctttaagtgtttttcacttccctacttccaccaccccaaagtggaagcagtctctcttcttttgagtccacatggcacgttaaagatcattgtaacgtcatacaacattgaaaagaatgtcttacattatcttgattcttgtatttactatactagatgataaaccccctgggcagaatgcatctgatctgtacttatcctcaaaagtagctagcatgatgtcccacattggtgctcagtaatatgtttcagttaaatgaacaagagagcagaggtatggccttgatgtttccagagaaggcagctgaggcagataattccatgatttgccaaatccaaataacttaatgtcatcatcagtgggcaagtctagaaccctaatatcctggtgctcaaaattagtgttatcaattcagtcttctccacattaaacaatttccaattcctttgaggcctggtgtgatggattctgtctttcaaatgctttttttctttcagtgactctatcgttcataaatgttaaataaaaccctcactctgttataaaaatatagactttaaaaattttccaaagtaaacactccagagaaaggtaggcgggctgaataggctgctgttgtccttcttactgcccagcgtcactgaaattttcaaaggctcctgtcctcctcgcaggtttctgccacctctttctgccagatgaacagtttcctgaagggttccagtttgacactgacgatgtgaatttccctatcgataatctgtgctttgttgggctcatctccatgattgaccctccacgggcggccgttcctgatgccgtgggcaaatgtcgaagtgctggaattaaggtagtgcccaggcgcctccttggcttcatctcttagtgccttgggacaccctactcagtgaatgttgccttttgaggtccagatggccagctgttctatctcacctggagtattaatttctcatctccaaagctttacttccacccagaaaagaccagatagtattaaaatatgatggtgtaaacacacgaggaattaaaaattttttggaaagcaattgtgtaaaaaagaaatgtaagcaaagtaaaaacagcaaaagacttgaagttttaaaatacttgcattattctaagttaatgtaccttatgcaatgaatggcatatcttctgtgttttcagttaactgtttgttaatgagtgtttggtgtcctctgtgtatctgtctttttttaagtagctgaatattactcaagtgcactaatatcctgttgctgggtatttggtttctgttttttactctcaggattttattttatttattttttgagacagagtcttgctctattgcccaggctggaatgtcatagcacgatctcggctcactgcaacctccgcctcccaggttcaagcaattctcctgccccagcctcccaagtagctggaattacaggcacccgctaccacgcccagctaatttttgtatttttaagtaaagatagggtttcgccacgttggccaggctggtctcaaactcctgacctcaggtgatctgcccacctcagcctcccaaagtgctggggttacaagcgtgagccaccacacccggcctactctcaggattaatactgccctgaaaagctttgtagaagttatttcctcaccattccgactgcttctttttaaagtatattctaagtataatcactgcatcaaaaaataacaattttgaattcttgtcacatgttgcttttcctccaagttgtgccaatttgagaatgctagccagtagcatgtggtgtcttcacagtcccaccagcatcagatttttatcctttttttttttttttttttttgctggttttagtaattttcaagtatttttatgtaactctgtagaaggaaaaatagacattgtgtatgctagtgattgtataccaagataaaacctgagtattgcctttgtgtttcctttctgtggatatatatgtttatatttttggctaatcgatgtttattagttttatatttgcattcctttccttttgatagtctaagccgaatcatccttagtatttactcttgcctactggatataagactttaaggtcatttacttggcagttgcattcaacacattgtcttgtttattacaggtcatcatggtcacaggagaccatccaatcacagctaaagctattgccaaaggtgtgggcatcatctcagaaggcaatgagaccgtggaagacattgctgcccgcctcaacatcccagtcagccaggtgaaccccaggtaaggcaggaagctcaaatcacagtctgctgtgaacaagcaaatagtgatggtttaaaatcttcagcgtggttctataatggtttgcatctaggcttgctctgagtaggaaatgtacctgcactgccagaaagcaaccttgtcattcctaagaagggttttaagtaagagcaagtcataataattagcacttagatggtatttactgttctaagagcttgatatggtgacctattatttgcagagcagggaaggtaaggattcaagaggcttttgaagtacctcagaactggtgaaatcatgcagtaaattcagcagtctagcttctgatttcatgctgttaaccactgagctctactgcctagcacctagcatcttgacactttccaggtccacactaacaaaataaaataaggaagggacaattacttaggccattcaggcaaacacaggagacatttggcaatgaagtaaaacagataatagcaaattggttttgttttaaggtttagggccctttcaccctatgttacggttagaggagggtttggtcttgtatcagctctgccactttctaaaacttggttatatttctttttttctttgatggagtctcgctctgtcatcccggttggagtgcagtgtcatgatcttggctcactgcaacctccacctcctgagttcaagtgattctcctgcctcagcctcccaagtagctgggattacaggccccaaccaccatgcccggctaatttttgaatttttagaccaccattttggcaagctggtctcgaactcctgacctcaagtgatccactcacctcagcctcccaaagtgctgggattacaggcatgagccacacacccagctaaaacttggttatatttcagcatgtctaataaagatagggaaaggaagaatacagacaggcctgccttagagatcatcatgagcctcaaatgagataaaatatatgaaaatgctctgtaacctgtaaagtactgaacacttaatagcttttatgtgctggggaaaattccttctttgttttgtttacaaagtgatctgcataagaatatcccctcttgaggtgatggacacatgctggtgatgtgatgcgtgactttttttttttttttgtcctaattctagggatgccaaggcctgcgtagtacacggcagtgatctaaaggacatgacctccgagcagctggatgacattttgaagtaccacactgagatagtgtttgccaggacctcccctcagcagaagctcatcattgtggaaggctgccaaagacaggtcagccagcacaaggatcaggctgctttgggcactattggctttagggattggagttccagtggaaacagagcaacggtgatggatggatgcatacctcgctgtattagactcagtataaataggccagtaggaagctcataggcatagagagggtgacttgttaatggtttagcagtgacagaagcactttaaagtccaggtgtccactgtgtcccagagcctgaccgctccgtggagtcatctgatatggggtcctagtatttgcaatagagatgtgagtggtcagactacagggcgtgcatacaggaatggcattttctggagtgccacccaccagagtcattactttgagtagctcttgttaatgctgggggctatgtttgttgtcacttctcagttctgttatttggtgtagggcctgtgtgaatacttgcctgtgacggttctcaggcttcataaatagtctcaataggaaaggagcagtgtctgtaatgagtgctcagtgggggcatgcatcgcactatttccatcgctaggaaaagtgattggtattaacccgttttcccttttctggggtagggtgctatcgtggctgtgactggtgacggtgtgaatgactctccagctttgaagaaagcagacattggggttgctatggggattgctggctcagatgtgtccaagcaagctgctgacatgattcttctggatgacaactttgcctcaattgtgactggagtagaggaaggtgagagctatttaaggtgtacaccaagatcttattcagatactgcccattagcatccatttctgtatacttcttggatatgttcagtttccagtgtgcttgtctcataagctaacagtaaaaaatcttggttttcataggtcgtctgatctttgataacttgaagaaatccattgcttataccttaaccagtaacattcccgagatcaccccgttcctgatatttattattgcaaacattccactaccactggggactgtcaccatcctctgcattgacttgggcactgacatggtgagtgtcacaacagtcacagatcgatagtagtgaggtgtgagctgtgtcttcattcactggcactatgctcccagcatccatgaggctggcgttgggaaaagaaattctcaggaccagtatccagtgtgtgtcccaatcccggcttcacagaatcagtattaccactcttcaaggcagcagttaacatttgtttatcagatgggaatctttatttttgtatacttcacctaaaagatttttaaatgggagggcaagaattttataacaaaaggttcacaatattagcttccttatttttagtaactaaattccttctccccaccccttcccaggttcctgccatctccctggcttatgagcaggctgagagtgacatcatgaagagacagcccagaaatcccaaaacagacaaacttgtgaatgagcggctgatcagcatggcctatgggcagattggtaagctgcagcctggagtgggaagctggcacatctaaggcatctgaggtgatggtgtccacctcaggttgaggttgatttcagagactgcaaatccaggcgactttcaggtctaggatgagccctaacggagtgagcctgtggagtttctctgaactctcttccatgtgagaatacatctgttgctgtttgcccagttaccttttgtggaaactggttttctatactgagcaccttggaactgggctcaactctgcctgagaaatgaggatgtccttcctcactgagccttgcggaacaggaggcatggttctaaggaattgtgtgtactgacgcacaggctgctttccctggagatacacacttatctgtcactcacttggatggagttaggcattggagaaagtatatgtgtttgagagtttggctggtaggtcaccaccaaagggtgatcctccatccacctcacactggacttctgcccccacagtgcagcatgactagctaacaggtgatccaggtggtgggcaatcagcatgccatttgtttttaaatcctctgcctagggttccttcaagagaacctggcaaagccaccatggatgtcttattctcctggattaatgggtcacataactgtgaacgcttggataaagaagaacagattagatagaatattgtggaaattatggcaaagattcattagacagttgttggcaacaaagtaattggctggtggcccatcctgaccttctccaaggaggcctgcttttgagaggaaggaagactaggtctctggtggtttaggatgaaaccctgccctgaggaacttggagcagcgtggttaaattggatgccagggggaggagggtcctgaaggtggggaggagagtcagaaagtgccacagtggctagaaaaatggcagcatgtaggaattttgaaagatggaaaagaagttatcatttgtcagagattaaaaagtagggaagtggatttcccctaaaggtcatacccttagaagcagctggtcaagtaacaggtgggcattttgagagcaaggcacatgtgtctttgtgtaggctccaaaaagtgactcaaaaagcagagggccctgagattggagtgtatgcctggggtcctccatcccatccctcatagcctgtgagtgaccaggcaattctttcctgtgcttttatcaaccagggggaaacactcctccatatgtgctctcccaggcctgctgcagtaatcagctgaaggctatacaggtacccttgtgtgtgaggttctagtaattgggttgttttcccaacttaggaatgatccaggccctgggaggcttctttacttactttgtgattctggctgagaacggcttcctcccaattcacctgttgggcctccgagtggactgggatgaccgctggatcaacgatgtggaagacagctacgggcagcagtgggtgagtgggcacctctgacctgaccagtgtcagagctcctcaagccccagaagactgaggccacactgccaccagccatgcaggtgaagagccagagctcatcttctgtcttctgcatttcagacctatgagcagaggaaaatcgtggagttcacctgccacacagccttcttcgtcagtatcgtggtggtgcagtgggccgacttggtcatctgtaagaccaggaggaattcggtcttccagcaggggatgaagtaagtaatgaaggacatgtcaaggccttggctcaaagaaggggactggtgatttgtaaaccctttgccaaaaactaaacatatgacacatatagccaggtttctggaatctctagtttatagagcaaatttaggaagcaagaaatgtagctttctagttttttcatctgacctccaagttttcaagtacagctaatacataaagatgttgatctgccattttaatgcatagcattagaagataaacctttatttgcaccttttaagttttttctcccctactttgattttaggaacaagatcttgatatttggcctctttgaagagacagccctggctgctttcctttcctactgccctggaatgggtgttgctcttaggatgtatcccctcaagtaagttgatcctctggtagctccaaaaagtatgaaatagtatgtgtggcttttccccccattacttgtggtaatagttgttattttcagaattttgagtggtatgtacaaaaattcctatgggttggaaaactgtgaaagcttgacatgtcagtaaatcagactaacaaatcctgaggcttccatgatagcagctagtgtttaggatttggcccaagataagataaagccacacaggctctagctccatggaactgctcaacagcgaactgcattgagcactcaggtctgccacagctgtagtccagttgtctttagaggccaactgggggtatgctggagcgtaggcgcccaggctcaaatcttgatttgcttgcttagtcactgtcccattacaagtcatccacctttctgagactctgaatactctgctctcaaagaaagaaggttggagaaacagatctgaggtcccttttactttataatcagtcatgggtagagttgatcaaaggaagcatactgctagtctttggccttaaacacagtgaatgactctgcatttcagataaacttgaattttcaaagagggtttatcacaaactccgttagttttttgcaacattgagtatgtttggtgatacctggttgaggttaagcaactgcaacttgattaaaacgtgcaaagccacagattgtgggacccatttacaagttcctttgaagcttttgatttaaagcattagtctcctttgaattcctgctgtcctcatccttgctcagacccgtctggaccatctctcaatcccctgttgccagcacttccttcagctcatcttatccctaaagtaaccaaaacccatcagcctcattcacttcctgtgggttatgtgcagacatcgtctgtggtgcaagatgagactggcatccagagtcagtctcattgtcccaacctgtctttatagctttctcttgtaccccttacccatccaagctcatgttaggtgaattcggctttcttcctctgcctttgtgtttggtaagatccttcctccccacatccctccttctgttccctcttaccctgccaatcctgatagtcccttcagggccggtttccttggagcttgtccctccagggcctgtgcacttgcacctcttctctggcattacttgttgcttgtcatttcacctccctgctaggttttaatctagaaggcatgggccacagtgtctttcttctctgtgcatccccagctccctacacaaagctggtgtacagcaggggccagccatctccaaattgaattctgtcagcttgggccattatgtatcaagatggggcttggagaggtcacagagctttccaaaaaggctggtggaaaattacactgaaaagggggcatttccatcttctgggtccttccctggtttttttgccaccaccaaagagattgttctgacaggttctgcccaattttggaaggtggttcagttattcggtgactgagtcaaatgagatcatctctcttagctgccttgtcagacacacaggaagaagaggagaccaccggagtcctgcccagggacagcctttctcacaccatagcagggagctggtgatcacggaggctgcctggagcctgtcagcaggctagagactgtgtggctcagcctccaggccccttggaagccttcgggctcagcttttttcagtccccaggaccaggcctcagaacacagagctgatatcccaaatgctgttgtcagagatcaaatttggggaatgcataaactggttttgacccacactggcaggtctttatcttcaaaatgctgggatattaggcagatggtcttaaaaagcttcttaaacactttagaaatgaaagaaagaaaatgttcagttgctctgggatggttaacagaaaagtactctgctcatcctataaaccaagtcttatgaaatccaaactgaagatgagtagggattccattacaaagtctgcagactgatttcctctgcgtctctaggccctgggcacatggagtagcaatctgttttaagacatttttatttgttctgttaatgactcagtagttaactgtgactgtacttggcttctcctttcaggctgattatttcattgtcactggtgatgtgcaatttctctttctttatttgaactgtgttcgtgtgcatataaattggtaccttactctatttccagacctacctggtggttctgtgccttcccctactctcttctcatcttcgtatatgacgaagtcagaaaactcatcatcaggcgacgccctggcggtaattatgggcattctgactttggttggaggaggagtgggaggggctatagttctattggttttttgtttccctcaaggtgtctaggctccctcagtggtcagtctgattagctaaggtgactggaccagcaaactgaccatagtcacatcttcagaatgtagatctcagttacagtttgaggactggtcatgttttagactttaaaatacaaaccaagtatgatttagtgaaaacttgtcagaatctaaaccatctttccaggtaacttggtattcctaaaaacatgtaaataagtacagttgaggtcccatgtttggattttaacacacccgacccccatcatcctccggttggttttcatccctgtttccctctgtaatgctggagcgaggaagactcactgtagtgtgtcttgtctgtctctttgccacccacaggctgggtggagaaggaaacctactattagccccccgtcctgcacgccgtggagcatcaggccacacactctgcatccgacacccaccccctctttgtgtacttcagtcttggagtttggaactctaccctggtaggaaagcaccgcagcatgtggggaagcaagacgtcctggaatgaagcatgtagctctatggggggaggggggagggctgcctgaaaaccatccatctgtggaaatgacagcggggaaggtttttatgtgcctttttgtttttgtaaaaaaggaacacccggaaagactgaaagaatacattttatatctggatttttacaaataaagatggctattataatggaa

SEQ ID NO: 943 - DNA, 32746 bp, Homo sapiens
  source 1..32746: mol_type = other DNA
gagggaagaagaaagaaacatttgctagccagctgagtgacagtgatggattcaaaacatcagtgtttgaagctaaatgatggtcacttcatgcctgtcctgggatttggcacctatgcacctccagaggtaataataatgtttttggtgcagagagttgaaaagagcaaagccagaataagtggaagctgacctgggttgtcaggtttgtgttcgtgtattactctgcatgactccaacctgagtttccctaggttaaagctatactgtatgtacaaagagaaaaagtcaacctttgttgtgcatagaagtctggttgcatggtcatctactgtttatttggggcactgttttttttcttctatttatgtttatttcatagcttgtcagaatccatgaaactcagcagtgaaaaacactgcctgcctgctcctctcttggaaattgatggcaatagaagtggtttctctgtttccttctacactgaagaaatcttttcttcttctaagaagacataatacagaagaatttttgtggcaaaatttagtggagatggggtgcatgaaatatgttgggagagtatcactgttctgatatgcggccttgagcaccacatggtaatactggacctggactaaagagaatttcccatgtactactctcacctctgagaaaattaccagaggatataaaatatcctcattttaagagaaaagaaaaaacgactagaacctaacaagttacgtttaaattattggcccttgttcatatgcatcagatttgtaacaaaatgataggagtggtcctctgacacaaatgtgagcaaaatggagactttattttatagactaaactatttctacactggaagaaaacttgtattccaagactgtcctgagactactatgtttgtgattagggactagatacatgaaatttgagtctcacttttctctctatcagtgtgttctgtgcaacatcactgggagaggactcataggagcttgcactgtattccttctgtaattccttccatgtacctttgtccctgtgttaatttcactttattaaaaatatttaggactatatatgtaactataggttgaggtcagtgtgggttaacctgtgcctctgctctcctgactccatggaactttccagagcagtcgacatcattgccaaatctgcaccttccatgtaggcctggtgtttttactactgtctagtggacacactgtggatactgcccatgtggccgcattagatgtttccaaaatttgtgcttatatcatgttctcccaaacctgctcagctccttatcagatcaaaaacatttccatcaaccttgtggtccaggtgccaattctcaccttctccatatggaattgctcactaaatcctgtcaattcggtgtctttactcatttcaaatctctttcttttttctctttggatgtttgcacatgacccaaacactgtatttgcctccagaaaggctgccttagtggagtgaataggagcacttggatttaattttctgcaatatggagatctcaattctgagaataatgaaattttaaaatcaaagaaggagtgtggatgcaaaagcccctttgttggaataatctatagccaacaaaaggcatttactatttcttcatgctttgaaggttttagtagtcatagacagtaactcatgtaatgagggaaaacagaagttatgtaactgctggcagtggagattttaacaagtaatagagatgatgagataatgtgtgaaaaacataacaacaatggcacattgtaagaactcaaaaactggtagataccattgttgatattttattaatatagaggaaaataaaacataaaaaggaaattattaaatgaaaggaagaatagcaagcatttgtaattcttaccaccaatgaaatatttaaggataagtaggcatttgtttttccctttattttttgtgctatttctacatatacatttttaatgcattgcatattcctggatattggaccctgtatcatacacaacagtttacatttctgaaaattaccaaatatgtttcataaggtaggcaggcactaggtaataaataaagtaataaaagacagcctaattgctaccagtagccattcacactcaaaattatttattagtgatgagcgtataacttgcctcttcttcttcaaagtagggcagaaagagttcctactttccttgggaatttgaaatagaaaaggtcagaatgactctttgctctgtaggcagatgtacaggaatgtttttgaagatttgactgtgtgtgtgttttgttttgttgtttgtttgttttgaggcagagtttcactcttgttgcccaggctggagtacagtggcgtggtctcggctaactgcaacctccgccttctgtgttcaaatgattctcgtgtctcagcctcccaagtagttggaattacaggtgcctgccaccatactcgcctaatttttgtattttttagtagagacggggttccaccatgttggtcagactggtctcaaactcctgacctcaggtgatccactcaccttggcctcccaaagtgctgggattacaggcatgagccactatgcccagctgactttgtgttttatgtattaagttccaggcaggggagtagaattgaataatttattattttgataatacagatactataaagtcatgctctcaaaaaatgcagattctccagcaatcagaatatgaacttcttaacatccacactaatggcagcttcctagaaatcactgtgctaccccccagtaatggaatcattgcagttcatatcacgcattattctttctttcttcagtcttgctggacaccctgattatccattttcagacaaatattaacatggaggactttgcgtgagttctaccagaggccctgtgtgtagatggtgacacagaggacgtctttatgctagtgattagacataccgcctttggctaaatctaccctgcttagagacttcagttaaccaaatataagtccacaggccataagggaaagacaataaatttgttttctttgaaataattcagtgctctcttctaaagattctttacctactttggtctccattattgtatgttttctttctttctgactcattagctcaaaaaggatgatttgcttataagttaggatcgggggtggtgtgtctggaattggtgggttcttggtctcactgacttcaagaatgaagccgtggaccctcgcagtgttacagttcttaaaggcagcgtgtccagagttttttccttctgatgttcggacgtattcggagtttattccttctggtgggtgcatggtcgcgttggctcaggagtgaagctgcagacctacatggtgagtgttacagctcttaaggtggcacgtctggagttgttcattcctcctggtgggttcctggtcttgctggcttcaggagtgaagctgcagaccttcatggtgttacagctcataaaggcagtgtggacccaaagagtgagcagtagcaagatttattgcaaagagtgaaataacaaagcttccacagtgtggaaggggacctgagcaggttgccactgctggcttggccagcctgcttttattctcttatctggccccacccacatcctgctgattgttccattgtacagagagctgattggtctgttttacagagagctgattggtccattttgacagggtgctgattggtgtgtttacaatccctgagctagacacaaaggttctccaagtccccaccagagtagctagagtgtcgattggtacattcacaaaacctgagctagacacacggtgctaattggtgtgtttataaacctcgagctagatacagagtgccgattggtatatttacaatcccttagctagaaacaaaggttctccacgtccgcactagattagctagatacagagtgtggacacaaaggttctccaagtccccaccagagtagctagatacagagtgtcgattggtgcattcacaaaccctgagctagatgcagggtgctgattggtgtgtttacaaaccttgagctagatacagagtgccgattggtgtatttacaatcccttagctagacataaaggttctccaagtccccaccagagtagctagatacagagtgccgattggtgcattcacaaaccctgagctagacacagggtgctgattggtgtatttccaatcccttagctagacataaaggttctccaagtccccaccagactcaggagcccagctggcttcacccagtggatcccatgctgggaccgcaggtggagctgcctgccagtcccgtgccatgcgcccgcactcctcagcacttgggtggttgatgggactgggtgccgtggagcagggggcagcgctcgtcagggaggctccagccacacaggagcccacggacggtggagaggctcaggcatggtgggctgcaggtcccgagccctgccccatggggaggcagctaaggtccggtgagaaattgagcacagcagctgctggcccaggtgctaagcccctcactgccctgggcttgcaggctggccagccgctctgagtgcagggcctgctgagcacatgcccacccggaactcgtgctggcccacaaggccatgcgcagccccagttcccacccatgcctctccctccacacctccctgcaagctgagggagatggctctggccttggccagcccagaaaggggctcccacagtgcagcagtaggctggagggctgctcaagcatggccagagtaggcaccaaggccaaggaggcaacaagaatggcaaggactgtgaggcctgccagcacattgtcacctctcaatcccccctctaaacaggacaccctaactgctgttgggaatttggccaatgactgctctagctaattgctgctggataggggtaatgaaggggccctgcagttgtagtgtcctccagaggggagttctccaggccaggggaagtgccagcaggttggtccaggggtccttggtagaagttgttaattgaactcatttggggttccatttgtaagaccatctgtagcttgatggccttgattctagaggaaacaaatttgacaagaaggttaaaaatacagggcccaaaggcaagtaacagtaagatggctgccacgggacctagaaaggggagaagccatgttgcccaactccagaggttggtataagaatttgaaaggcgttgtctgatttcagaagccttttcctgtaagcgccggttggcatcttgtactatccccgactggttagtgtgaaaacaacactcttcccctaagaaggtgcagagtcctcctttctcagcagtgaggaggtctaggcctcagcagttttggagagtcactgctgccaaagagtctatttgggattgtaaagtaagaatagatttcgttatttcttgcaaactgtctgagaaatcctttgagagtgtgtggtagtaggataatgaagtagataaaccagctattccggttcctgtagcagtagccattcctaaccctataagtaggggtattagttgtatggctctgcactgacggacttgagctttgaggggtactgataaggtctgatttcctggggcaatgttaatgttgggatttagaaagactaaggtgcaggtgcctgtccagttagtggggaggcagatataggtcaatgttccgcataagaaaaatatgccttggctgggtagacagaactttatcctggcttttaaaggaatgggatacactgtttttttctttactacttccatctctctttctctttgacttctttgtctcttcctctctttctgactctgactttctgtgtctgtccctctttctctctgactccttctctttgtctctttctctttgactctgtttcctctctctccttctctttgtctccctgtttctgtctctgtctcttcccctctgtctctttctttgacttcctgtctctttctttcctttctgctgcctctgccagctgcttatgctgctgttctcccctcttcttcccattttgatggatttgacagtgtaagactcccacctccttgggtttttgcactgcatgcaataactctataatttccttatggtatttaatgggggttcccccagaggttaggaactccctttctttccacattgcagcatgggcacgcaggattagataagcatacttgctatctgtatacacatttattctttttccctttcccagttctagggcttgggtaagtgccactagttctgctaactgggcactggtccctgggggaagaggcttactttcaaatatggttacatctctgtggcataacctgtccttcgtatcccattctccacaaatgaactgccaactgtatataggttaaggtcaggattagttgaggggacttctaagagatcatctcagacggcataaatctagactataatttgttggcagtcatgctcaattggttccccatcctctgggaaaaagtggcagtgttgaggggcatgcacatgcatatttgaagcaccagtccctcaaggagtagtgcctagtatctaagtaggcagttgtctgacagccataaacttcctttggcacctagtatgccatttacatcatgagtagtccagacagtgagatcctttccttgtattattttgatagcctctgacactaagacgtccactgctgcaactacccttaaacagtgaggccagccttttgctactacattaatttccttacttaggtacgccactggttgtggggttgtcccacgagtctgagtaaggactccaagagctatactggctctctctgtgacttataaagagaagttttgtcctgtgggaaggcttaaagatggagcttgtactagggcctgctttaaggttttgaaggctgtttctgcctctggttcccattctactagatgagtatttgccatctgggtttccttgattagggtatagaagggcctggctatcttgctgtatctggggatccatagtcggcaaaagccggtaattccaaggaaccccctcaactgttttaatgtcttagggcaaagataagccagtataggctgtattcgttccttgctgagggccctggtccctctggctaagattaggcctagatatttgacctgctgtagcaaagctgggccttcaacctagacaccttgtaaccttgattagctagaaagttcaacagatccagagtagcctgctgggacaaggcttccaaactggtagccaaaagtaaatcatccacatattgaaggaccagagtgcctggacttgagaagtggcctagatcttgggccagtgcctgaccaaacagatgagggctatccctaaacccttggggcatgtaagttgggatgtgtggtctgtgggatcctcaaaggcaaagaggaactgggagtcagagtgcaggggaatacagaagaaggcatccttgaggtccagaaccatgaacgattctgcttcctctagtatttgagagagcagggtatagggattgggtacaactggatatagaggaattactgcctcattgatgtgtctaagatcttgcactagtctccactgaccattcggtttttgtactcctagaattggggtgttgcagggactgctgcatttccttactaaggcttgagctttcaaatgtttaacaatattctgtaatcctttatgagcttcaggccttaagggatattgcctttgataaggaaaagtggtgggatcctttaacctgatttggactgagtgggcatttttcgcccttccaaattgtccctccaatgcccagacttcagggttgattccctcctcaagtaggggacaacaaatgggtaacttgtttcccatattcatgtagataatagctccagccttggctaatatatgcctccctaataaggatgtgggactttcaggcataacaagaaaggcatgtgaaaagagcaaagtctcccaattacaactgaggaggtgagagaaatacctggtgccaggctgtcccaggattcctcggatggtaacagaccttgaggacagtcatccaggacaggagattaacactgagaaggctgcaccagtgtccaggaggaagtcaatttcctggtcctgaatagttaaacatacccggggctcagtgagggtgaagacatgagctgacgcttgccctgggtaccctcagtcctattgttggatcatctggttgggggcttctgacccagggaacctttgtcctctggggcagtgcaccttccagtgattgcctcagcatagtggacatggatgagggggcagcttgtttctcattggacaatcttttttaaagtgtcctagtaaaccacactgataacaggccctaccaggtgatgggcctgctccattttctgtcctctctgaaccaccaaggtttgtttgtctgagggccatgactaaggctgcagcctttctctgatcatgcttttccttttgggtctgttcctcttggtccctattatagaacactgaagttgccaggtttaataatgcctctagattttgttcagggcccagggcttgcttttggagctttctcctgatatctgtggctgattgggtattaaacttatcttttagaatcaattgaccctcgagtgatttgggtgacgggagtataatttcttaaggcctcatgtagccactcaaggaaggcagaaggattttcttccctttcctgagtcatggtggacatcattgaataattcatgtgcttttttctaattctccttagtccttctagaacacaggtcaacagatgtttacgactccagtccccatgatctgagtcaaggtcccagtggggatccatactggggatggcttgctgactggtagggaatttgtccctttcttcggctgtcatgctatcatttactgactaagataccacatatctccaaactctcgggctgtagctaaagctgcattcttttcattaaaggccagggtttgatctaacagtagcatgacatctctccaagtgagctcaaaggtttgccctagaccctgtaggacatctatgtacctatcaggatcatctgaaaacttccccaggtctgccttgatctgctttaaatcagagagggagaaggggacatgtacccgggttgggccaaattcccctcccctacagcttgaaggggacataaccaatagcccggggggttttgtggtcctttggagatttctttgcttatttccttctgggcgggggaggttagaggaggattatcattaataggaaggggagttatagggaggctaggatctggaggtaagctgagaggtcctcctgtgggatgtaaattgtaagctttgcatagttgtgtattctccttcaatgaaaagaaaacttggacataaggtatttcactccatttgccttccctcttagagaaaaggtcaagctctgcaggatagtattgtaatttgtacttccctcaggtggccatttttccccatcaaagagagaatattggggccaagctgtagtgcagaaacaaatgagccacctctttttcagggtttgtgggtcaaattggtcccaatggcttaggatgcattccaagggtgagcctgttgatgcctgagtgtttcccatctgaaagacaaaattgcctgtggttttggtttgttttgtttctccccctgcccaagaacccacaacagtccctggaccctgctgatcagaatacctgtgctcaccaacgcagcagtggaaacaacccctgcccaagaacctgcaatggtccgtggaccctgctggttggaatacttgcgctcaccgacgcagcagcagaaacgctagttttcctcccagaccacatggaggaccaaggaaggttggatttagtggctcttatcgacacattctcgaaaacctgcacccttgcctgtcctcctagaccacaaggaggactgactgagaaaaatcagatttagtggcccttaccgacacattctcaaaaacccgttagagtcctaagcattcaccggttagtattaggactttacccctgtcctgtaaagatgttatgccccaaaaatgaagtgaaggaccttaccctgacggaggtaagggatctccagggttggaagagtgacaccttttgtctttacttatatgaataggaaggatacaatttctgaggctccccacatcctagcttcaggaatagcttttgttaggcctgttagtctgaggagggatcctaaaattccaggtagtccccactatgatggggctttgggcaaaaattatgtctttctgattggtgaatccaggtgcctaaagaaggtaacagagttgatactagaagtcattcttatgggagaaactagaaaaacaccagagacaggtagcagtctttagaagcaagactaaccttggagaagagagtcaagagaaagtttctctggcaagctttaggacccagggggcaagggtcaggatagataggatagatgagtgagtctcacttgggcgacatgcctttgagagttccactcatggctgcagggtcaaccaacttgtcatcaggaacccggagctgcatggttttcctctctgttgacccttggctcagcccagaaatacaggaaaagcagaagctggttataggcaaaccaatggtcccaactccgaagagtcgggggttgttagccctttcccagaaagcctgacacccgtgtctttagtccagcggccgcactagtcccttttaactggctgacaggtgcccggtatttagcccccaaattctaaggaaaagtaggacagaatagcaagcaaaaggggtctgatggtactcagtgcttggcgataggcgatagtctcgctgctcagtgatagctgatggtctcacccctcggcgatagtctcaccccttggcaataggtgatggtcccttcgtggtcgccaaaatgtgtccagaaatggtgggttcttggtctcactgacttcaagaatgaagccgcggaccctcgcagtgagtgttacagttcttaaaggcagcatgtctggagttttttccttctgatgtttggatgtgtttggagtttattccttctggtgggtgcatggtctcgctggctcaggagtgaagctgcagacctttgtggtgagtgttagagctcttaaggtggaacgtctggagttgttcattcctcctggtgggttcgtggtcttgctggcttcaggagtgaagctgcagaccttcatggtgttacagctcataaaggcagtgtggacccaaagagtgagcagtagcaagatttattgcaaagagcaaaagaacaaagcttccacagtgtggaaggggacccgaacaggttgccactgctggcttggccagcctgcttttattctcttttctggtcccacccacatcctgctgattgttccattttacagagagccgattggtctgttttacagagagctgattggtccgttttgatggtgctgattggtgcatttacaatccctgagctagacacaaaggttctccaagtccccaccagagtagttagatacagagtgtcgattggtgcattcacaaaccctgagttagacacagggtgctgattggtgtgtttacaaacctcgagctagatacagagtgccaattggtgtatttacaatcccttagctagacataaagtttctccaagtccccaccagactcaggagcccagctggcttcactcagtggatcccacactggggctgcaggtggagctgccttccaatcctgtgccatgtgcccgcactcctcagcccttgggtggtcaatgggacttggcgctgtggagcagggggtggcacttgttggggaggctcaggctgcacaggagcccacagaggtggggaggctcaggcatggcgggctgcagatcctgagccctgccctgtggggagacagctaaggcccggcaagaaattgagcacagcagctgctggcccaggtgctaagtccctcactgcctggggcttgcgggctggccagctgctccaagtgcagggcctgctgagcccatgcccacctggaactcacgctggcccacaagcgtggcgcacagccccagttccctcccgtgcctctccctccacacctccctgcaagctgagggagcgagctctggccttggccagcccagaaaggggctcccacagtgcagcggcgggctgaagggctcctcaagtgcagccagtgtgggcgccaaggccaaggaggcaccgagagtgagcgaggactgcaagggctgccagcacactgtcacctctcagtgggagatgatgacaaccattttgcagacctttttgaggtgggcatggatgatttccagcttctgaagaaggagctggtgacaggtatatatcagtgcatctttagctatttgaggaacaagaaaacacacagcatggagtctggaggatgagggctattgacaggatgaccaggaatccatgggcttcctccagcagtgtggagatcagagctcccagagcctaggaatgaggcatccctatgggaggggtgttcagtgaggagggagggcacacagccagaagaaatgattacaggtcagatatggaagaggtttagaaggagggggttgagtacatgtatgcttggaaaaacgcattggcaacattttgggataattatatgttgtgcataaaaggaaactttctccacaatccttcaagaaaccccagagctgagagtcaggcctggacctctgatgcccaattacagtattgaccctattgagctgtggtaggacaggacattgaagacaccattgactgatcagattcccctaactaccaacccatctttagaaaatgttcttagattccagaaatatactattaatttattatacttgatgtttttaaatgtttcatacataaaataaggcatgcttgtaagtatgaaagacaaaatgtcttaaagccattacatattactctcaaattaaggccaaaatggtgaataatacatctaataaagcaaactctccaaaatcccaaaaatcttttggaaacagtgtttgcaaaattgcacaaagttttcaaactttagtaaatgttaggaacaactcttacaaagacatgtaattctttcacatagtttttaggagtacaaagtaaatcagctaatcatggggacataaattttcatttcagaatactcttttgagaacttgggatatcctggtgaaagcattttgaggacagtggtttttgacctgggcacactaacactttcactcaactgttcttactctggcggccaccttaaccccatcaaagaggctttctcaagtcaggtctcccagcatgttttgcagcccacaatctttccttaaactatgtattccttaaaattcagggaggctataaactttggagtgccctaggccaatttcgtggactgttttctgtctattttcattcccttgatggtctctggctttaaataccacctctaggttgagaaacactctaaaaatatttgtagctgagcttttccctccaaactccaggacagaacataataatgtgtgctctacatctccgtattagtgtctaatgaacattcacccttagcatgtctcaagcaaaccatgtaaaccagtgccatcctgttccacctgcactttcttattttaactaataattatttcacatctcataaagttgattgaggtaattaccaagaaaacagtgacattttctcaaaacttacaggtcaagtgtgtaactcctaagaaaaaattttaaatgtcgaatttctttagcaagcataacatgtttttccagatgtgagataatcattagggcagtcatttgtaaatactagatctgctacaggcttattccagccagttcattacttagccctctatttccacagaactcctagttaaaaaaaaaaaaaaaaggaaagaaaacaaaaaaacttgtaatttctcaaagctcaacacttggtttttaggaacacttgggaatgtaagaaaatggtatagggacctccaatccctgattcattatttttttctctacaagaaatgctgaagtgaataattcaggatgaaggagaggaaatagatagtaactaacagccatttagacctataaagatgtcctagtcaatgtgaataggtggcaaaatatgaaaacatgtatttttgaaattttggaattgtactctatttttcttgaagatttaaaatatgaatttatacaaataagtataattctaagttaatatgtacacaatgtagaaagctgtaattagtaacaaaacaatgtgaagtggaataaaaacctggggaaagggagagtttttatataaaatttaagttacattggcattgattcaaagtaaattgctatgattttattaaatcgtatgtcatccccacagaacagagaataactgtgttagaatatactccacaggaaatgagaaagaaataccaatgtcattttaaaaaatcacataaccttacgaaatggtagtaaaggtgaatatgaaggacaaaaagctatagagagtgggaaacattgaaaatggcacaagtagctgggagcagttgttcatgcctgttatcccagcattttgagaggctgaggcaggcagatcacttgaggccagaagtttgaggccaacatggtggaaccccatctctactaaaaacacaaaattaagccaggtgtagtggtgcaagcctgtaaccccagttactcagaagcctcagaggcagaggttgcagtgagccaagactgcgccactgcaatccaccctggaggacagaggtagtctctgtctcagcaaaaaaaaaaaaaaaaaaaaaaaaggaaaatggcacaagtaactctttccctgtcaaaaatgacagtcatgtgtcatgtaatgcctgggctatcttctgagaaaggctctgtgaggcagctccatcactgtggggacatgaaagcatgaagagaaaattctctcaatgtcattgcctcgccaactacgtttatgtcatattctaaatcctttgctgtcatttcaggaatgtttacagcatcttcatcagaagtggaatctatttcaccaaaccagtttctttgctcatccataaaagtagcttctcatttggtaaaattatatcgtgagattgcaaccattcagtaatattcaagctccaattttaactatagttctcttactatttccaccacatctgcagttattttctccactgaagtcttgaattcctcaaagtcacccatgagggtactagtacagaagcaggcccatggaccaagggaacactagagaagtcccagaaataatgctgcacacctgcaatcattcaacgagtgatgctgtgatgactagctagccatgtgcagaagattgaaacgggaaagccttccttacactgtattaaaaaatcaactcaaaatatattaaaaccttaagttttaagcctaaaactatgaaaaacccttgaagatatcccaggaaataccattctgaaataggccctggcaaagatttcatgatgaagacaccaaaagcaattgcaagaaaaacagaaaagacaagtgggacctaataaactaaacagcttctacacagcaaaagacactagcaacagaataaacagacaacctaaagaatggaagaaaatgcccacacactatgcatctgatgaatgtccaatatccagaatctacaagaaacttaaacaaaataacaagcaaaaagaacaacaactccattaaaaagtggggaaaatacgtgaagagatgctttttaaaagaagacatacttgtggcaaacatatgaaaaatgctcaacatcactgatcattagaggaatgtaaatcaaaaccacaatgagataccatctcataccagtcagaatgcctattattatactatgcatctgatgagttccaatatccagaatctacaagaaacctaaacaaaataagcaaaaaaaaaaaattaaaaagtggggaaaatacatgaacagatgttttttaaaagaagacatacttgtggcaaacaagcatatgaaaaaaatgttcaacatcactgatcattagagaaatgtaaatcaaaaccacaatgagaaaccatctcataccagtcagaatggctattactaaaaagtcaaaaaataacaggtgctgctaaggttctaatgaaaagagaacacttatacactgctggtgtattagttcaaccattgtagaaagcagtgtggtgatttctcaaagaacttaaaacaaaattactattcaaccgagcaatcccattattgagcatatagctcaaagaatataaatcattctatcataaagacacgtgcatgcatatgttcattgtaacactgttcacaatagcatagtcatggaatcaaattaaatgcctgtcaacaccagactggataaagaaatctttacattctcacaaaatgtatataccacattttaacctccaagatgatgatattaggaggttggtacttaggagttgattgtgttaccgaaagagggtgtccaggttcttggcttcttgaacaaagaattggacaaaatgcagaaaaaaatgcaaggaaagaataaagtagcaaaaggagatatttattcgaaatgaaagtacacttcacagtgtggtaatgggcatgagcatagggccccattacagaatttgtgggagtttaaatacactctagcagtttccattggttacttgctgtatgccctatgtaaatgaagaggacaaagtaaggttacgaagtcacttagtgtacaccctatggaaaggatatttcctgtcatagctgaagtgttaattggccttatgttccctgcctccagacattattttcttgactcatttccccactgagagatgtgatcttcataaatctttatgggaggcagagggacagctggtctttcttctgtagctgcttcatgctggcttggggtgtagtttctacctattgaggatcacagaactctcactctgctctctctagtggaggcagggtatctccttgatggccaggggtggtgtctttacctggaattggctggagcctttgttgcatgatcatctgaagctagatggtctctaggtgagaggaaatgaattgggttaaaacatttattgggaacttcaggggtggatacctatgctgtcgagaatgtttgttatagagatttgcaggagacaaacaaaattttgcttgtggtgtgttctaggatctgtgtgtttccttaaagtcttagaactagcgactccattttggtttggtttggtctgttgaggcttagtgcatgagcccagtccaaaacaatggcctcctatcatttcatttcagaaatttcccctttttgatcaggttctcacttaggtgagaatgtgaccaaaacttagggccttagtgccactctcagttaccatcattttgggtttcccatctcagcatgtcattgacaggttacggtgtcctcatggttgcacatttctttcagctcttgttattccagtcgaagagagaccaaatgacatcctagtgatggttgcatataagcatttaaaacctttgagagaatatagcgcagcaacgagactattattatgactattgggagcataatacctagagtttggagtatggtgctcatcgaaggtccccataagccaaacctcctaaaatagaatcgattaaagaatgagctagataaagagtctactcacttaacttagcagtctcatctccttcactgaatttccataatcttcatttaatgtatttttccgtaggtcataagtgccagctgcagcatagatacttttctgttcatccaactctattataactttcacaaaagaatttaaagtctgttgtttaactgtaggccttacagtaaaatttgctatagagcatataatgggggtacatttctattcattgcttctctactctaaaccatggaaaaagcacttaacaaatgatgcccttctaaaagagtgaaggcctcctggcaatgttctctttaacccatgatgtggattaagaggagtgaatcattgtttgtttgtttgtttgtttgtttttgaatgattattaggcaacatatgtaccattaaagtttcttaagtacattgggcctttgtcctttatctaacaaagtataagtttatccacttataaggctggctgcaaattccttaaacaaaagtacaccccataagtgcacataacagatcccttttccatttctattgttcagagaggcataagcaagaaaaaataataaaagataagaatttcatgacagtagaagtgttaatctgttaacttgggaaaagatattcacatcaaggatgccatcttcattttgggagaaatttccctggttagttttaccttaagggctccaatgagtgtacaattccaagagtgtggagggaactttctcagttgtgagattatgtacccaaagttcaaggtcccaaagttttgttgtagtgcagatggcaagatcttctgatgttctcagaagatccaaacaattgaaagctttttttacctggtgaaaatatactgtagcataataatctactgttataacaccagccctcttgcatgggaaagcttttatacaaccagaaaacatgcattgaaaataacaattgaatgacatcctttcataaaatgtctaaattgcacaccaggtaactgaatgtacctgaagctttgtattcccaggaatatggggccaaacaatagttataaactatgttagtaatttgtaagtttccacaccaatgtactcaaattggattattttatcttttccatggtgagtcatggagtgcagaacttttaataataaatgctttaaggactcaggaaggacaatgtggccatcctggttctccatgagtctaaacttgattaacattagacttatatcctcttgaataccagttgattctccaaattaggtgcattgtactgatagctgatgagttaccatgggtgatttgactcagaccatggagtttattcaaattgtatatttaaataattttagtattagcttgtttaacatgaaaatctgacaaagtattttcttggtatttgattaatttttttgttctacttggattagtagctttatacaagaaaatttggttatttctatggtttatagtaacataataatcataattatagttgatggcatataattagacatttgaattttagaaattccatataatcttagaacatacattagcattattcacaaaatataacctaaagaagattgaacatcattttggtgatcccatgtacctaaacatgttaaataatcttgtttacctcttttctggatgttttcaggggccatctgatccatccaaaaagccaggcattagaaaagacaattttgaaactgaagtttgattttggaattccagattgccctaaattacttattttgccaaaatgatgactcagaaattttaagcaaaaaccctttataaccttttaccaaaaaaaaaaaaaaaacacattttactattcttacacatcttgcatataaaactgtttctagtaatcttaattacatgttaatggtgactcctagcaatcttaattgtaatgtaaaacctgctaagttgtgttctgataagattagaatgtttccagcatagttaggggcatggccaactccccatggagagggggtggcagggactcagggggatcttcaggcaggcagaggggagaagaggcaagagcacagggaatgctgggagcctcccaagaaggcctctttcatctcagaagcccccagggccatcccgagtgggctgtcctcaggccttacctagctggaaagcaggcaagttaaacaaatttcaaacaccaaagaagcagtttatgaccttaaagcatttagcaaacctaatatttgaacataacttagaccacatgtttacattttcaagacaactgtattttaccaataatctttaaaactgtttatttcctaaagattactcaagtcacatgaactaaataaaaagcattacatttttcacttttctgacaaaatatttgatttaagctcttatattattattaaaccaatttaaaactttacagaagggacaaatggtgacttttacctttcatttaaccagtttgcacagagcgaaagagaccagagactaactggtaagaaatattcttttgcaagcatgtctggtttctgggttctttctccctgagtggccctagggaccctgctcaactgtatgcagacaaacatattgccatgaattaagaatattcacaaatagtttacaaattttgaagaaattaggcagagagagaaatagaactcaaattctatttatgaaagtatattcaacatgcttaaactgtctagaagcctaaaatccaaaaagttagttagaatttgataacttctgaattatacaaagttattctttttctcactactaacataatcttttccagcacattttgcctactgaattatgtgttaactagaattcttatccttataacctaaaacttaagcgaaaccctaaaaagcaagaattcctggccaggcatggtggcttatgcctgtaattccagcactttgagaggccaagacaggtggatcacttgaggtcaggtgttcaagatgagcctggccaacatggtgaaacccccgtctactaaaaatacaaaaattagcccagcatggtggcaggcacctgtagttccaactgcttgggaggctgaggcatgagtattgcttaaacccaggaggcagaggttgtggtgagctgagatcacaccattgcactccagcctgggcaataagagtgaaactctgtctcaaaaaaaaaaaggaaaagagcccttccgccttctgcgcagggcaaatagtcccattcattcctaggccttcaggcaatacctgggagtgactccagccaattgccttcaattttcaaggagctgctagaaagcagttgttgagaggctgaaaatgaaagaaaggaaaaaaagagaagacccaggtcccttaagcaaactggttggtgacggttaggtgccttcacatggacacccttagttttcactggccatagccagaattctgcagttttctctgtgtttaggcactgcccaccaaggagagattcccctgtatgaaacagaaaggaaaggagagaaataaatcctaatctttgggcctagcttctgctggaatttctcctggctggctcagcaaaatatgttaccagtggagggtgtccaggttctcagcatcttgaacaaagaattcaacaaaatgcacaaaaaagcaaagaaataatgaagcaacaaaagtagatatttatggaaaataaaagtacactccacattgtggaagtgggcctgagcgtagtggctcaagggcctcgttacagaatttgtgggggtttaaatactctctagggattttcactggttgcctggtgtacacactatgtaaatgaaaagggtgaagtgaggttacaaagtcatttacctggaatataccttatggagaggacatttcctgtcatagctgaagtgtgaattggccttgtgttccctgtctccagaccctatttttctgtctcaattggatcttgagtgtggaaccataataaatgggattagtgtccttgttaaagagattcaagagagagtgcttgtcccttttgtgacatgaggatagaaagaggacagctatctatgagtcaggaagcagggcctcactagacactaaatttgtctgcacttgatcttgagcttctagcctccagatctgtgagcaatccatgcctgatatttataactaaccagtctgcagtcttttgttatagcagctgtcatgaactaagacagcctgttagaaggaggcttagacttaaccagtgttttgggggtattttaggagccctgataggtgatcttcatgtctgctttgcttctatggggtggtattgatgggctgaagtggattgtcccagctactctggaaacatttctttttgttgcctcacaatggatttccacttatttacagagaattatatggctgtatcttactgtgctttatgttgctataacaaaataactgtaactggctggttcttacacaatagaggtatatttggctaatggctccagaggctggaaattccaaggccatagtgatctcattggatgagagccttcctgctgtggtgctccatggtgcaaagcaggagagtaagagatcaggagcaagagaataaataagcaagggagatcagtggcagagactctccctgctctcatgggctctgtctattccctctctacataatgagagtaaaatccaaagagcatgaggaccaaatcaaatatgacaaagactccttagaggcgtgtcagtactggtaacacctgtttttcacaactcacggtgactaaggcacagaccaccccacacagtggcacggattctcttcttgaacagactttccccaggctcctctgagtctcttttgaaataggcctcgccttggtctgtaaggatctgaacacacccaaacataatttctaacagttcaaggctacatcaatagataaccaagccctgttaaagagccagcctgagaaaactcacggcttccaaaagaattcagtatttgttccagcaatgtctgaagaaatgcctgtctcccagtctcacagagggcaggagtccaacttcccttagttccagttagcaaacccagagggactaatcacatggcccaagcagccccttcctactttttgtaattttccgcttggctgattccactcagtctctgctcagcctttcccttctccctcattttccctttaaaatgctgagtcatcttgcatagatcatagttcagttcagttcacgctggacctcttctctactgcgatgttatgttactgataaaacctgtcctcaccatgttaatcagtacccagctttctttgtctttgactttagcaatagcagaatttgttttttttctggctcttatgatttaatagctacagacaggtgggaatgaagaccagcctatgtgacacttatctctgggttctagtactattgagcagcaatttaagtattagggatttacaaatgtgtttaatttatggccaaaccctggcataagtcaaaataaatgcttatatttgatcactaaaatacgaggtaatgatccacctcagggaggagagtatgtgactgcaattagaatctttaaagccttctgtttagaaagcatgcttgcttgaacttcaagtttctaggcaaatgtaagggtcatttgtaaaagctgagtttttcctgttgccaataaggatagagaccttttcttctatgctcatgtcttagactattttcttaagaaaaaaattgtatttgtaaactcttccttagtccctttattatgcatgtcagttttttgaaaagctgactaagcctctagccagaattgcaacctgccagtgttgtgttaagggtaagagagacaactctttggaaatgaaaatatcaagaaagataacttcctatctccatgggccccttactccaagctacaactgcctgcttgtcataaagaaatgttatttttccttgggataaaggtgactgtctagcacagaaggataccccaattaccaggtgaatttaggatggagaatgttataaaaagaatgtttgaaagaatgttataaaaaatggtggtgttaggccttattacatgaagaccagttatcatttatctcaagaagatgcatgtaaggattatatttcttggctatataaaggggtgagatttctttctgtctttgtaatctctttagcatgttacctgtgatgcacattgcagcctggtttaatgctttttaaattttatttgtttatttatttattttcgagacagagtcttgctctttctcccaggttagagtgtagtggcacaatcttggctcactgcaacctccgcctcctgagttcaagtgattcacatgccttagcctctcaagatgctgggattacaggcaggcaccaccccacccagctaatttttgtattcttagtagagatgtgatttcaccatgttggccaggctggtctcgaacccttgtcctcatgatccgcctgcctcagcctcccaaattgctgggattacaggtgtgagccactgcacccagccctaatgcttttttaataagaaaattattttctttattttctactttatagagagttttgtagaatggcaggagatttcatttttaacattattctccaatataaaggagaacagacttgacagttgtcccaaattaggtaaaagattgagattggagatccccataggcccataatttctacctttggtaacataatggaagacatagaacaaccctcccctacacagactcctcagtgggacagcccaattacatccactgtcctgagcacatggaccccctttctctctcagtcttacccacatgactcagcgagcagctccagcccagatcacagaaccatatgaagaattgaaaaccccaccttctcaagagggccaagggcagagcattgacatatttgattagtaccaaggagacatgagaaaaatgaaaagactgccatgactgtattttggtattccagagtttctgccttgctgctatcaagaacatcaccctcaccttgggtgcttcttgttagtaattcttcctccttgacctcaccctgttctgtggttgtaaatccccacttgtcttggttgaaggcagagttgagcttgaaggaaaccaaaatatttcactcttgggaaaggaagataaatcttagggccccaaaatcactaagctaaagaaaaaagtcaagctgggaactgctcagcacaaacttgccccccattctattcaaagtcacccgtctgctcaccgagataattacatatttgattgcctcctttgcagaggctaaccagaaactcaaaagaatgtaaccatttgtctcttatctatctatgacctggaagccccctccccacttcaagttgtcccacctttccggactgaaccaatgttcatcatacatgtgttgattgatgtctcatgtctccctaaaatgtatgataccaagctgtgccccgaccacgttggacacatatcctcaggacctcctgagggtgtgtcatggtcatttgtcctcaatattggcaaaataaactctctatattaactgagacctctctcagattttgggggtccatactctaaaagaaagtattttgacaaatttcaagatggctattcagaagggcaggaaatacaagaacagctgaaaactgtctgttatgagagaggcttgcacctgtagagaaactctgcttggatgcagccaggctttctctgaggctttccctttgacttaggaaagattaactgacggtctgacatctttaaaggtctgaagaaaacattttccatctcttctcttaagtgctgctatctgtgaggtttcattgacatagtgtgcaagaagattaaattttggtacccgaaactcttttagccaaagagaaaattctagccaggaactgggacacaaaaacctgcctccctcttttggttcctaaataagatggctacaagatgaaaggctacccacctcccccatattttgtccacaaggaaattcctggtgagctgttgaaacttcaccatggtgatacaaatccatagcttatctttacagttgcggtcaccccacagacacaaatgcatttccgattgttcacctaccccattttgtctgtgttatcttatgtaaaatgcagagtccccatatttttcctctgccccctgttgttgatgtgagaactgtgtgcttctcaatatcccgccctttcccctttaaatttggagccctcaaaatcagagaaaggcatagacctgtctcctgggtgcatcctcaactttggcaaataaatctcctaaaattactgagacctgtctcatcattctttggttgacaataacaagacctctgctagccaggcctcctcttttctccctcccataacccatgttgccactacaatctgttttgccaagatttaagtccctctctcattttttttttataaacttagatggtttacacgttgctctgtggttctcccctacacatggtcataagtttgtgtgccttttctctttctaatctgccttttgttaggtgaatttttagtgaacttaagaaggtagagaaaattttttcccttggcccccaccagcatgatcgctctcccacagaaagacccaaattaagtggccctacatctaacgccatggccccccttgagtgaagtatttctcactgtgttttaggaaatgtcataaataagttttttttaacaccctgtcggaccataaaggattgatctactggtagacacttattctcaatcagagcttttcccaagggaatttgtcatgtggaaaaaagccatttgtcaaggaatggccaggcattgtggctcatgcctgtaatcccagcactttgggaggctgaggtgggcgaatcacctgaggttgggagtttgagaccagcctgaccaacgtgaagaaaccctgtctctactaaaaatacaaaattagccgggcatggtggtgcatgcctcctatcccacctactcgggaggctgaggcaggagaatcacttgaacccgggaggcagaggttgcagtgagccaagatcatgccattgcactctagcctgggcaataagagcaaaactccatctcaaaaaaaaaaaagtcaaggaatatgggagtcacgggggctcggatgtattactaggggggctctagagagatggaggggcacaggttgctggggctaagatatcctgagctgcactggtttctgagctattcaaatcccagttgtttcaccctttatttttggaatcacccaggatccttttagcaaccacctttcacttgcatttaagcctgtttttacggttgcaaacacacaaaacacacttaaataagatgatgtaacagtagttctcaaatcatagcaacaactctagtagttgtgtcctaggaaattaaaattctgtgttacctacttgctatggtttgatgtgttctccaaagtccatgtgttggaaacttaatcctcaatgcaatagtgttgagatgtgggacctttaagtgataattagatcatgagggatttgcctcattcattaattattgctattatctcaggtgagttagttatcggagattgaaatcctgataaaaagttgagtttgttctctctgtctctctctctctctctccactctagaattgtaaaaaactaatctctattctgcataaattacccagtctcaggtattccattatattagcaggaaatggactaagacactactttataaaattttgcagtttccaatgttcagcttttccttgatccggcttcatctacatttttctttgcttgttactgatggtgaaattttcctgttgtctttcatttatggcttacactatcacatgctctgtactaattcatgccttctatttccttctgttgtttttggaagcatctcttttcatgtgtctcatttttaggctctataagacatatcgtaaaactcacttgattcctcactgtcatgcatagagctctgtctgggggaagttctccctcctgacatgctacgccattacccagccaaaggagcactgcctttgctttatttgcacattcctgttttaaacagtcatgcccagaattatgtggctacttggcgcacataatgaaaaatctggtttttgaagtcatgcataaaattaaaatatctttgtatttggttgtctcacatccactgtggtctctgtttcagcacctcattgggattattgaactcattaaattctttacatgaacttgaattgttcattgaaatctctagccatttccctggttaaacaggataatctttttttttcactaaagaacattcgtggtggtttagtgatgaggttaatattcccctcttgtccacctccacattggaaaaaccacgttggactgagttttgaggagcaaagaactaatcacttgaccaaaggggccctgtatccccacaagccctgggtatttttctctcatagagagaagagggtctgtatggatacctgaaaatgtgattttatatattcttggcatccaggggagaaaaatcaaaaagcaaggaagctacagttatctccccagaaattaatgggtcatgtcaagactataggttttcatttccttctgttgcttgttagaatgatgttcttgtgggaaactggagttccacaattcccatttcttcttgactccctaccctagctaagtactttattcttaagagactggcaccaagtcactgtgtcctattatggaaatgcaaggtttgtcttttgaatggatttctgaagacaatgggtaaaacattaaagttgatttaattgcttgcctgtctgggcaaggagtttggtttttgctgaacattccccttagtaaaatggcaggatggtttgcttgccattgaaactaaccaaacatttaatccttttccctttagagaaaaaagaaaaaaaaaggtgcagctcactgccagtgcccatttagttttacattaacatgttccttgaggttgaagcaaatctgaccgattttcaatgtaaaaataacatataaaaactgttctcggagttatttctaaacagaactaagatcagaattctttgaatcatcagaatcatctcttttgaaaaatcgattcatcaaatgaatcttcagccaacaactgttcaagaaggatgcaaatatcacaggtaagaatcctacattttctaagatgtgacattgtcagtgagctgaaaatatgattactatattttgtaaatggaaataccattacaaaaacagaaagctataaaaggaatgatgtcttttgtttccaaagtcaacatactagagtgattcaaaaataataataagtcaggtgcggtggctcatgcctttaatcctaacattttgggcggctgatgcgggtggatcacttgaggttgggagttcgagaccagcctggccaacctcgtctggccagtgaatggtggtgaaacctcgtctctactgaaaatacaaaaattagccaggtatggtggcatgtgcctgtagtccccgctactcgggaggctgaggcaggtagaatcacttgaacctgggaggcggacgttgcagtgaactgatattgcaccactgcactccagcctggtcaacagagcaagaatctgtctcaaataataataaccataatcataatcataaaagcgagatagtttgtggcaaagttttctcagggtaaactgccaccacgagtgccactggtgagaattcttgggtcaaatgaaaaaagggttaaatgcaaggcaggtcatcagcaaagtacagtacctgttcgtgagttgattttctctccagtccgacatattcctcaatatgatttttaaatagaatagggatctcactggaggacatgcaagtaatttaaatttgttcatacatataggcagggcccagagagattaagagcacatgtggtttaaatgctgttatctctgctttgtgaatagcatggtaagttgaaaatatttgccattgaagcaagggactatttgcctcaaggttaaataagacaagaagagcttcagatgcctggtctgcagtgatgagtagaacaggcccttctgctgttgggtgcagacatttctcctccaccttctttaaggcattaacactcactagacgtgttcatgtaaaggtgtctcgatagtgttaactccagtctccttgtgagtcttgctgacttaccatgactagaggacttggatggcatgctagaccttccagtagccagcctggatcattgtacttgttctgagttgcacaggtgttttacttttgtgccaggtggttggaaataggcacataaaatggagctatttgttttaaaatcatttcatttattgatgctcttgtccagtgtgtctgagggtggtatctgccttcccaggaggcaggagtggggcccccaactgaggagctcatggtgcactcttagcttttaagacttgtcatacagggtgcaataaaacaaaatgtgccactcaaaatgtacttttttggtatattttgatcttgctgttaagaggggctacaattcagagaggctgcagacacagaaatagccctgaaaagctttcttctctggcagagatttgcaagtgctgaggaaatacacgttagtgaagtgaacagaggagaaaagcatttctctgaggcacaccccacccccaccttatctgcctaattggatcaaggaaagattaactcccaggaaaaacagactgagatcctaatgctttaaaggtctgactgagaaacttctccataggccactgtctatcttcctgagggcagcttggggagcccctgagagactcacatctgtgtggggacagccttggctcaccaagcatacctctctctctcccccattacctgagaccccacctccccgagagaccccaagcccctattctctctgtagcctcaggatgtgaggaaatcttcaatcatctggtcctgcttggagtctcatatttgctgctccatgtacatgtatatgaatttatatgcattttatgttaattattccattgtcagtgtatcttatgtaatcaagtcaccaaaacttcagaagggcgaggaaagaaaattttctttgcacctgcaggggtatctgcatggtatgcaaagcagaaaagttaaagcgaaataatgaatcagagtcagggaatgagcaaacatgacctggacaatggcaatgaaggaattgtgcacggcctctatactggtatttacataactgaggtccatcagtgccaagatctttgtcttttttctttccttccctctcactgcccatgtccggacataggccggtaagagcgtctggttaagatgtggagtaagaacatcttaagatgtggagatgggaaacactgtatgggaatgtgaatgagtgtgtgaaaatgttaaaaatcgtgttgagaaaaaaatctttccttgtgcaagtatacttacttgcataattatcacctttagttttgtaattataagatttctcagagcctggctgggtgcggtagctaatgtctgtaatcccagcatgttggaaggctaaggcaagtggattgcttgaggccaggagttcatgaccagcctggccaacatggtgaaaccccatgtttaataaaaatacaaaaattagctgggcatggtggcatgcacctctagtcccagctactcatgaggctgaggcagaagaattgtttgaacccaggaggtgcaggttgcagtaagctgagattgtaccactgcaccactccagcctgggtgacagactgagactccgtctcaaacaaacaaacaaacaaacaaacaaagatttcacagagcctgccattgaatgtgtagtgtttaggaaggatggaaggatcttaaggaagccactatctgtgtctcactttcttcgtagtgttagatgaactttctggttgacacctgacaggaagagcctctgtattggaccaccatgtttgtgctcactgtgtagtaacaaaccaacacaccaaaatagcgggagttgccactgacaaagagttgaatgatcaaatgacggccaaaggaggaggtaggacgcaacctcaaattcactgccccaaggagttttagaatggggttttcaagggacttttggcagatagagggctgaggagtgggggggttactgattagttagggtgtgggggatgaaaacataaagatatagtaagtgcattctaggatcaaatcagttccttaaagtgggtatttacacaggatggtatcagtggatctgttggaatgcaggatctggaaaatatggaaaatttgaaacttcttcacattacagaagttatctatagaagttagggccttgtaatacaggctataagctataagcagctataagaaagtggcctgtggggcatagctggttaatgtttaactacccttcaactcaaaagctttgattttgctaaaaacctagacattcattcagttttattgattttataaggatggtgtcaccttcattaaacacatttgttctgagggacagttgggccgcagtggccattgacttatgtggccaaaatgcttgcattgaccaaaaacttgctttcacatgaataaaaatattcctccaaaataagcacttgttttgagagtctctgaaaaacaatcattgtatataagaaa

SEQ ID NO: 944 - DNA, 12511 bp, Homo sapiens
  source 1..12511: mol_type = other DNA
gcttccagcggacggcagcgcgcgaggtgagacggcgagggctcccggggcgcaggtagagatgttccgtcggtgccgaaggcccggctagtgcggttgtgtggacggcgaaaaaagcaagtccgccttcacaagtcccatggggctggggagagggtgggaggcggagagggtatggggaggggagactctcctcagatcctctcgacaccgtcgggtctgggctccaagtccaaggccatcgatcacctgccacccacagaccaggccaggcgtcaaagcaagtcacccatccgacctaaacccctctaagaccccggagtcacgtctccctccggggatcctcgtgaggtcttgggggtcccaccgccctgcgagccgcgcccgcgccccgccagacccggaactgcgtcgctaggtttgcgctggagctgctgggattgctgggcatgggtgggggggcgcagaggaggaggggggattggagggacctctgcggagctggcagaccccggtactactgtcctggcgcacccagcccttctctgtaccaggccgggagagggaggcggcgccgcagagcctcgggtgcagtctgagaagtttgggagtgacttgaagagtgactggaagcaccccagacccggtttgtccggtcacagccgggtccttacgtgagttaggagaggagtgggggtcggacgggagccccactgagagtaagggcgcgcgtttgttcacagaacgtcgggacctggttccctctttaatcacacccccgggggcgcttcgtgtgaggttccacgggggaaggcgagaggcgcaggctgccacacacgcactgtttggaagaggggaaggtagggaatagtggtccgggtgtgggtggtgggggatgcggctgcttagatctgtgcggtccaggtgattttggagggggtcttgaagtgcttgctcccgccctggcacctagggctgcacttcctgctttcatccagaccaagttcggatcaagtgggagttcttcaaagagagagtttggtaagaaactggggaggcaaggaaaacctcttaaggccataaatgccacaaggtttatagacatcgaatcgccatcccagtttaactcgagtctggatactttggcttgcatgattctgcacccttgaattccttatccacatcagcccttactggggaatcctgcctccaatccacttttcagatcttgttcaatttctccacttaactcctatttttgtgcaacaacacacatatacattcatacacagatacacacgtacacacagaccccttccttgaagaggaaagtctagcacaggagttcctgacagggtccccttagctagccacagctgtaaacgtttaatggggtctaccccaatcagagaaaaaagcatcacattgcagtagctgtgcattaccaatcagaggtcttggcaactccagccatgtcacccactccccacttgtggagaattagtggcccttactctatagtttccagcagatgggggaggtgggcaagggggaagacttcaggaaaaaagtcctgtcaggctacaagagaggccacaagacgttagcacataactttgaatgaagaaggctggaggttgttctaggctgaattttcttaaagattgtaactttatgttttacccacctctcatacacacataggaactccacttcaacctgtggtaggtaaggattgggtaattgtgtctataataagattgagcataaggaaagtcttcagtacataagggagcctggaaagggaggatgctgcctcctcctccctaggccaggtgagaaaggaggaccctaaagtgtgggaaactccccccaccccatgagaaagcatcccaattttgtcacaggggcctgggatgaagtctatattactgagaatgacagtctgggtggttcttgcgtctgtgtctctgtttatctaaatttgtaggtgcatatttgactgtatcttgtgtctgcttatttatatcaatgtacactgtgcatacatcctagtcatggtgatgaggtaggggaggagtgggtcaagttaatattgatatgagattttctcacattaaaactaattttactgtcagatgttacttgacgagccagaaagaaagatgttccccagggaaacacaagcgttgtaggaaaagcaggactgtggggtgtggggtcttctcatttctgtcccacctcttcatgcatgagccctgttagcttaataatgaaaacaaaattagggtcagggtcatgaaaaattaactttaaattaggcaatgcaaataaaggaagacctaagttatgaaatggaacaagaagaaattaagaaaggcaaatttcatttaccaactgtttttttgcttctgtcatctttaataaatatgacattttggagaactggaaataagttaacattgttctatacttaaaatacgaaaagccttttgttagtgtttcttttaagcacatgttaatagaaatgaaacattcttgtaaatttttttataacctccctttaaaataaatgcaggaataatatttaaccctgaccaaaatacattatattatctcttattcacatatattaaaaatactcctttttgaactccagcgtatcacatgtgttcttgctgttagcctcgctttatcttctatcttattagccaagatattttacattttatagaccttcctcctatgaacttttatttaaaaatataatagcttcagtctacatgtcataaataaagaattcttacgtcagtaaacatctgctttaaaataaataccactatcacatattttataaaataatttaatacacgaattcttagttactcatttcagctaagattgagatgtatgtttctgattcaattaaacatgaaaattcatgtttgggtctttgttagtcttggagactctaactattggaagaggctttctgaaaattttgagaaattactaaaagttgacagggttagtcaaatccctttgtgcccagtccttagctctgtattggtgacactcagttaatattgaattattagcacagggcaataagggagcatagctcccccttgtgtgcaaaatcagaagccacctgtggggagaggaactcattcatatttattcatttgatccagagcctgattagtatactctacatccaggggatgcaaagatggaaagatgaaatctctgccctcaaggagattacagtctaattgggagacagatgttcagacaattagagtacaatgtaatcattgttatcatgaaggtatgttcaaaatgcaatcagaatgttcaaagtgggaacctctacattggcccagtggcatcagaggaaacttcacagaggagggaacacaaactgagacttgaagggtgaaaaggcatttgccaagagagtgagtgcattccaggcagaggaaatagcatatccaaaggtattgaaggcttgaaagagcgtgtcagattcagggagaggtcagtcattcagtatggctatagactaggctgggcaaaagatggagacagtataggtggaaccgggttataaagcactttatgtgggaaagtaagaagatgagattttagccagagcagagaagtgaaatgattatattggcttactagaaaaaaaattattttggaaccaggtaagagaggatgagcttgggttagggcagaggcagtacagaaggaaatgcatggatagtttcaagaaatatttaggaggtaagatggtccaggtgtctggcttatttgattgaccagtggtgatgttgccaaacatacaaagacaatagaataaaaagcagggcagagacaatgaattccatttgaggggttgttaaaatttcaggcatcaagggaacatccaagtgaaaatgtccacagggtggttggcccttttgagtttggagctcaggtaggaggactacctgaagacatttgagaaccatcagccatgggaatggatgagattgcccagggaatctggaatactgctaaaagaagagagccaccacagattcctggggagcatcaacatttaacagggaggaaaaagaactagtagaggagccacaaagagatggccaaaagcaggagcccctggagaacatggtgtgatggaagtgtaaggaggtaaagtttgaggaaagggggcatggtctgcagtgttaaataccacagagaggtcaagaagcatgaaaagtgaaaactgccctttggatttaacacttagtgacctaatggagaaggcagggatgaggaaaagtcagattgtggtaggttgaagagataaggcaatggaaatgccaatatacactgttttttcaaaagcctggctgtgacaggaatagagtaaaataggatggtagctggaggggaccaagaagatcaagggagaaggttctttttttgtgtgttcttaaggtgggaaaaatttcagtatacccttgagagaaggagccagcagagaaaaagaagctgggacgctatgatgggaagggggacaactgatgataaaggtggtggagaaggcaggcatgaatggctagagcccaggaggatggattcgcagaataggagagaagagagacgcctattcctcagggatgggagagttgagtagttaagaaaaagcaaaaaagttcatgttaaaactgacactcagggattaagtgacttgcccaaaatacaggattagaagttaaaactgtctgtctttctgtctctttgcctgacaccatgctactctcacagacaacacaagaaggtggccagcttagaaggagagaggaaggctgggagctagggcatattaggaggatcccagcattagaactaaaagggacctggggattatgaaatccatttacagatgaagaaaccaaggactcaagaggttgtcgcttacctgtccaatatgacaatattagtaaagaacagaaactagtcccagaatggattccagctcagggttctcttcaaaaaagattggagaggccgggcacggtggtttatgcctgtaatcccagcactttgggaggccaaggatggtggattgcttgagatcaggagctcaagaccagcctggccaacatggtgaaatcccgtctctgctaaaaaaaacttaaaaattagctgggtgtgatgacccgcacttgtaatcccagctactcaggtggctgaggcatgagaattgcttgattctgggaggcggaggttgcagtgaaccaagatggtgccactgcactccagcctgggtgacagagcaagactctgtctcaaacaaacaaacaaacaaaataatggaacataagaacttaataaaaaatttaaatgtactccattttttatttacttaaaataaaaaaagagattgaagaaagagataaatggagtaacaaaatgccccctctttcccaacttgatagcttatttgtttccagtactattctcagcactttatatacacaatctcatttcatgctcacaatgatgcttacaagatagacattactatctcaaatttttaataaaactggatgtctgtaaaggtcaagtaacttgcaagaggcagaggcagaattcaaaccctctggggctacttgactcccaagcttattctttcattataacgcttaataagacaatgtgtggtcagactaaattatggagccttctgggcaaactgaaaccccagtacagatcacactgcatgaaatgaggaaaactgggatcattgactctaagatgcattttttttttttcacattctgacatctctgaaattaggtacatctcaccagcaatggtggccatggtttaattggcaagactttttttcccctttatttgtgctaaaatagtagtgtgtcatgcaatccattctgtctgagatttaactaaacacattaagttcaggtaccattttcccaatatcctgtctgcaaaagaacaaataagagtcaaacaagttctcagatcaggggatgggcagagaagaccacagctagcgtttgagctgaaacttggcctgggaatttgaatcaaagagaagggccattgttggtaatgtgtggaatagaaggacatctggccccagcactgcctgatagagggcaggtgccccttcagtgcttatttaggtgaactcagtgaagctcaactgttctgcagttaccagaacaagagccagggtgcttgagaaagctggacagacctgtgtgggcagtgctaggtctggaattcagtcctctgatgatgtggctggattatatacttagcagagagctgcctggcctttgttcctttggggactgaggaagaaagccaatctttttgtaatctgtaccatctttcaccttatgccttcacctgataatatagctccttttatgttctgtgatctatctgtgctaggggcctgaaggagagagaagagaattttatttcttgagacagtcccagaagaaacagagaagcccccagggtggtggtagcactgacttatggaacctggaggttaagagaggagaatggggcaacagagactgatggcaaagaccctcattctgtcacctaaaagatggggagatggatggctgaggggcagtggaacggtggtaatagcagagtctgatgatgcacaaaatgtgagctccagagaagaggaacctagtctggctcattctgtgctgtatctccagcactaaaaacagtgccaggtacattgagggcatgcaataaatgtctattgttgttgtacagcattgccccccctgcaccacctcaccaagatggctactttgggacacacattccccttctatgctggccccaagccaaccttcccgatggacaccactttggccagcatcatcatgatctttctgactgcactggccacgttcatcgtcatcctgcctggcattcggggaaagacggtgagaaacccagtcctggagaccccagcccagagagacctcagcctcaggctgaggggttcagagtctctgactacaaccaggctaaggaaggagaccccagtgcggagaaaagatagccacgaccccaggcagaaagctccccattcattgattcagcagttcactattgagcgctggtggggcatggtggctcatgcctgcaatcccagaactttgggaggctgaagtgggaggattgcttgagcccaggagttcgaggccagcctgggtttatagtatagacctcatctcttaaaaaaaaaaaatagctgggcatcatggtgtgcatctgtagttgcagctacttgggaggctgaggtgggaggatcacttgagtggctgcagtgatataagatcgcatcactgccctccagcctgggcaagagagtgagatcctgtctctaataaataaataaatgcatacataaatacataagcacttattatgtgccagacactctgatttcaattgaccaagtgatctcagctttagaattcccgcccctcccccaagtctggaaacaggaagggtagatgtggaaggaaggcactctttacttaacccacctaccttgtgactcagaggctgttctggctgcttcgggtggtgaccagcttattcatcggggctgcaatcctgggtgagtgcgaagtgcagctgacttgggctgctgcctccatcccttcaactccctcagcagcctgcatctcctctccttgtttccccacagcggtgggcccttgcttcagggtggcttccagaccctgcccatatgcttctctcaccatggccttatctccccactcttacccttgcctggagaggtgtcaccctggaaaacaagctggatgcatctcctcaaccttcctaacacttttattcgggggaaaggaggtcaaaatgaatgtctgtggggagagggccccagaaaggaagggaggaaatgggaaacagctgtttgctttagtttggtgatgaggcaaataggagagatgaaagtctccgtgaggccgggcacagtggctcatgcctggaatcccagcactttgggaggctgaggtgggtagatcacctgagatcaggagttcgagatcagcctgaccaacatgggggaaaccccatctctactaaaaatacaaaaaattagctgggcatgatggcagacacctgtaatcccagctactcgggaggccgaggcaggagaattgcttgaacccgggaggcggaggttgcagtgaaccaagatggtgccactgcactccagcctgggagacagagcaagactccgtctcaaagaaagtttttgttgaagctatctgcgtttgccttgcctggcatggttttggttcatgtttccttcccagctccctgagtgactctccctaaagcagggagaaagggagggaagaggtaaacagaatatggccaagggaaatcccacacatgtggttggcagacttaccatgagccagaccctggctagttaacgggtatccagttatgaccaaaacagacatggaccccttgtatttctccttctgactctaacctagtaatgcccagtcatctctgagttcccatatgtccaactccccaaccacagctgtgaatttcagttctgagtggtctgtgggccaggtcagcaccaacacatcatacaaggccttcagttctgagtggatcagcgctgatattgggctgcaggtcgggctgggtggagtcaacatcacactcacaggtgagggagggctcttacctgtggtgggggggaaggctctgccatctttgggatctatgtttggtgtggtcaaagagctataggatgcctggcacaggggctgggaggatgtgtgaggtgggaggtcagaggcatggtaggaagggaaattcagggccttggaagctaccttctctcagttgagaccacttcctgtccctctgcccagtgtgggtgagtccctacctaggccccactctggcccttgggttcctgctgagcagagctgccttgtgccctagggacccccgtgcagcagctgaatgagaccatcaattacaacgaggagttcacctggcgcctgggtgagaactatgctgaggagtatgcaaaggctctggagaaggggctgccagaccctgtgttgtacctagctgagaagttcactccaagaagcccatgtggcctataccgccagtaccgcctggcgggacactacacctcagccatgctatggtgaggatgggaaggagacggggtggaggccctggtagcctagattcaggaacagggtttctacccatctctcctccactcatgtgggtatctcaggtggggtggcctggcaccagtccccatggtgctggcttgggaagtccatgggaaggaatccctacctcatatctttgggtcactcttgggtccctgaacctccgcctgggcccatccaaattcaccagcaggtagaagtacctgggccagtcctcactgggtcctggctctccagggtggcattcctctgctggctgctggccaatgtgatgctctccatgcctgtgctggtatatggtggctacatgctattggccacgggcatcttccagctgttggctctgctcttcttctccatggccacatcactcacctcaccctgtcccctgcacctgggcgcttctgtgctgcatactcaccatgggcctgccttctggatcacattgaccacaggtaagacccagccctaaagacaagcactagaagtctcaaggccagggagggagggcctgggggcatcatgtcggtagagttgagggtctgttcctggaggccaggatggctttgccctctttaaagtcccaccctcttgtatctcttatctcctgattttctctccccagtgccacttcccccccctcctcagagatgcccactcccttgtatcttctctgtctctgtcatcccctaactctcttcacccagctgcttctaaaatcttccaaccccctgtcccctcttgcttcctccaaatacccttctctgggtccccattcttaaacccttccctgtcctgccttacacatccctaaattgtcctgcagtcttattctcctctcctgtcccgctgtctactccctcatgtgcctcctcatgcctcctctgtgccctgcccttccccagggtttttttcttttctctccctattttcagagttctccctctccccctttctctctctctctctcccgggatataacagaaggagcactgggcttggagtctggaaacttaggacaacagagccacaccagccacatgcccctcagccagtcacctctctgagcccaagttgccctgaagcaggggctctaggcttcccttagagttgttctgacactcccaggggaagatatcctcggcaggtgttactagcactaaggtgggacaattgttgccctcatctccaggactgctgtgtgtgctgctgggcctggctatggcggtggcccacaggatgcagcctcacaggctgaaggctttcttcaaccagagtgtggatgaagaccccatgctggagtggagtcctgaggaaggtggactcctgagcccccgctaccggtccatggctgacagtcccaagtcccaggacattcccctgtcagaggcttcctccaccaaggcatactgtaaggaggcacaccccaaagatcctgattgtgctttataacattcctccccgtggaggccacctggacttccagtctggctccaaacctcattggcgccccataaaaccagcagaactgccctcagggtggctgttaccagacacccagcaccaatctacagacggagtagaaaaaggaggctctatatactgatgttaaaaaacaaaacaaaacaaaaagccctaagggactgaagagatgctgggcctgtccataaagcctgttgccatgataaggccaagcaggggctagcttatctgcacagcaacccagcctttccgtgctgccttgcctcttcaagatgctattcactgaaacctaacttcacccccataacaccagcagggtgggggttacatatgattctcctatggtttcctctcatccctcggcacctcttgttttcctttttcctgggttccttttgttcttcctttacttctccagcttgtgtggccttttggtacaatgaaagacagcactggaaaggaggggaaaccaaacttctcatcctaggtctaacattaaccaactatgccacattctctttgagcttcagttcccaaatttgctacataagattgcaagacttgccaagaatcttgggatttatctttctatgccttgctgacacctaccttggccctcaaacaccacctcacaagaagccaggtgggaagttagggaatcaactccaaaacgctattccttcccaccccactcagctgggctagctgagtggcatccaggacgggggagtgggtgacctgcctcatcactgccacctaacgtccccctggggtggttcagaaagatgctagctctggtagggtccctccggcctcactagagggcgcccctattactctggagtcgacgcagagaatcaggtttcacagcactgcggagagtgtactaggctgtctccagcccagcgaagctcatgaggacgtgcgaccccggcgcggagaagccatgaaaattaatgggaaaaacagtttttaaaaaacaaaagaaaaaaaggtttatttacagatcgccccaggagactttccctggtgcctgcggatgtccgaggcctcgcgccagcagcgctcagtgcccttcctggagctctcctggcccaggcctggcgggcactgcttcccggcctgcgatgtcccaaggcggggaaggagtccagattgggtccccctcacaggttagtggtgatacattttaagtctgggagagcggcctgcttgtgcagtgggtcgccgaggataagaggtgagccccctctctcctggctgcagtccttggcgctttggtccagaagggtgcgaagagcgctgggccgaacatactggagactcaccacggcccctccgaggaagaggcacaggacgcctgtggcggtggggatcgaaagaaaggagggcatgtggagtcagggctatgttgcccaggctggtctcgaactctggcctcaaacgaccttcctgcctcgacctcccaaagtgctgggattacaggcgtgatgcccgggccttcttccatcttttggagcctaccccttgtgttacctcccgccacacacctctaatctgaattacatgaaacacggcaagacaccaaacccttctgagccccccacttttcatctgtaaaatggtcataacagtgcctgtttctgcgaactattgagaggggcaaatagggtaatagatgtgaattcattctgtaaactggaaagtgc

SEQ ID NO: 945 - DNA, 32744 bp, Homo sapiens
  source 1..32744: mol_type = other DNA
ggcggagagggagcctggtgggcgggcggggcgcgtcttgcgggctccctcgggtaccggcgctgccgcaccccgccgcgctcccgcacccgcggcccgcccaccgcgccgctcccgcatctgcacccgcagcccggcggcctcccggcgggagcgagcagatccagtccggcccgcagcgcaactcggtccagtcggggtgggtgaggggcggcggcgggggaggggacgactctgctgagctcagcctctcttggtggatgtggggcggggcgctcgagtaggacccgacgccaaggggagggggctgacctgtgcttggtccaccccaggtaggggctgagagaggcttgaggtggaagtgggggtcgggcactctgacctggtcgaggaggggctagggtttgaaccggggacagagtctaggtgagctggggcttgggagctattagcgtagaggatccgggttcggttgctctggcgagggctccagcatcacaggtgaggagcagagctcagcttgtgctcgaggatgggggtgcggggtcctggggcgatcggggctcgggctggagcgggtggggtcgcgtcttttcgggtgtaggggagctgcgttttcaggggcctcggtttcctcccgtctccgggcgggtgcgggaaagaggggcgccaggggcgggcggcggggcggaacggggcggggcggcgggcccagcgaggggggtggtccgcgcgcctctgatcgcgttccgggacacacaggcggcggctgcgggcgcagagcggagatgcagcggcttggggccaccctgctgtgcctgctgctggcggcggcggtccccacggcccccgcgcccgctccgacggcgacctcggctccagtcaagcccggcccggctctcagctacccgcaggaggaggccaccctcaatgagatgttccgcgaggttgaggaactgatggaggacacgcagcacaaattgcgcagcgcggtggaagaggtgggtgcgccctggcggcgcggggctctgagaagcgccagactgggggcagcgaagtctgggaaggcatggaagagcgctggccagggacctcgggtcccgcgcagggcctgggaagggccgacagcagatgcggagtgacctggaggcagcgcacggtgatccctactcccgcctcgttttgcctccttgccaaaaagtctggatctgagcctgtccaccgagaggctctgcactggaccctccctaggtagctggggccaccacctgcctgcagttggcgtcaggcatgccgttggccttccctattgtcagcagaggtttgcagggcccctggtattccagcactgtggtttcacagaaacccgggacaagctccaggcatcgccaagttctagcttgtccgttatgctttgagcttgttaggatgccatgcagggacaaagaggcaaagagccctgagctttgctggcagtctgtctgggctgtcttgcttctcacgcaatgtgggggcagagagggaagatggaaatcctaaatctcagcactgtatgagtggcggatgaggatgtgagaggcaataccccctccacccaacggtgcttcgcagttgtcctgggctcaggtcctcctctgccactcagtagcagggtgacattgggcaaatcacttaatatcctgcacctcagtttcctgtgaaaactaaatgtcatatgtgtgggcacctggcaaataataggtgcgcagtatttagcaactattatcagataccacgtaccttagcaaagctttgcctagcttctgccctccatcacctccaggtctaaacactgtgggtggcatcttgttctgtcctctgtgatggtcacccacgcatgcccagggctacctgggcaggagatgtcactggcccagccctctctgtccaggtgcggggagctgtccctggtgcctggggtgggtagacgagggcgctgttgggcccaatctgtctgtagcctgtgtctatagagaggagccagccgtcctagtgaaggaggcagcaggaaaccaatgtccaggctggttggcccctggtctggcttcacatccctgctgtctccagcttggtatcccccttgggcaaagccttaactgctggcccttgtctccagggggaagttgctttctccccgcagccctttgtagtttggggctatttcccctcccactccacaacagttagcctgtggagtttgcagtgaaggggacactggcttgggaggcagtgaaatgggcagctgtccttgaatatccactggacaggcccagatcccaagacccatgatctttctgtttcctgtgattgcaaaacaatcatgacatggagcaattaaagggtgaagggattcagataggccccaatgtctcttaactctgaagcttcaaattaagtggagtttgcgatgcctctggttctagggcaggccatctgctttccttatccaggttctaggactttccctcctgcacacagattcccggtaagactgactaagtcacctctatgtttttgtgcccaccactgttcagaaagtctgcagcgtggtcctctgacgttagcttctgctgagggaggagagagagcagcaagggcctcttcagtctcttcttgagcagagcagtgtggggccctgcaggacctagtgacggggtcttctccatgggcgttatccagactggattttgccaagaccccagctttcctccctctagatgtggctctgtgtaggttggggggttgaagtttgccaccagaggagatgtgggctgtcacttctaccccactctttcccagaggtgtcctcgctggcagtgggtacaggatgagagaggttgaacaccatggcaggagaagaggcagtggggactgatcttccctcatccagtccctgctctgccacttactggcagtggcgttccgagtctgaagtggagaaatgtccacctcttagggtaaggtgagaattaaatgagatgctgcaagtaaagcaaatcagtgagttgggcagctatccctgaatatccactggtcaggtcaagagcccaagatccatgatctttgtttcctgtgattgtgaaactatcatgacatggaacaattaaagggtgaagggagtcatataggccccaatgtctcttaattctgcagcttcacattaaattgagcttgtgatgcctgtggttctagggcaggccatccgctgactgcctaaaatggggttaagtaaaacacgtgtaatacaggtagcttcattgtgaggtggctgtaaggatgacatgatggttggttgtaaataagtaacaggtatcattatcatcatattactagtagcagtatgaatgataacaaaacaccaccagtgtctgatagattctcaatagaatctatcttttaaaatatcttaaaccattaaaaattaatcttaaaatactaaaagtatcttttagatatcttcaaaaatagaatacaatagattgtttatagactgtggttattagtattaactttttatggagactgccagaatgccccttaaatctcatagacacaggataattggtatttagtcattgttcaggggaaaaatcaaaaaggacctgggccagatgcattatttgtttacatagttgcatcatgaatctcctttcaagtaacttcctggcattttcaatgttccagctgaatcaagctgttgaagtttcttaaggggaaggacaaagcagctctacttgtacggtcattattggaagaagcatatcttcaaatggcttcaatctgggatattcctactttcctgtgttactattctatatgctaccaatcaatgtattctgaagatataaccactctgtttctcttcccctcatggccagctctgtaactcactcattttagaatgttcttactgcctcacctatttctagtataagtgccatttttaatagcattcacattcctcctctacgaaacagctccttttgcttcagacttaagtttctcttgctagtggcaataatagttgcggttgaaatttccattgtaaactatacttttagttcatggtgccatttaagaaccgttagctcattctgttgaaataaccagtggctgagctggggggaaaagttttataaaaagactatctgctcagcccagagcaaattctaggtttggcaacttgtcaattatttgaaagccaaactgatcccgatgggaattttaaaaacactaaaacattctcttcttctgggtgggtcctctccagcaccttcagtcttctcttcccagctgcgtttttttctatcactaaccagagtggtaactgagggcaaggtctcttgcttttaaggaaagtcattttcttgcccattctgtcttctatctcagccccatttcttctcccctttgttggcaagctcttcaaacacatgatatcaacgtttgctcttcctgcttctagctacccattcccttcagaactctggcaaaacaaactggcttcttttgaaactgccttcttaaagggcaacgggataaaaacagctgtgtatttcatctttgctgtgtggcagatagtgtatttcatgccttaattcttatatctactgcatggtccttaattcttatatctactcaacaaagtaggacatccctattttacaaatgagcaagctgaggtttagtgggatttggtatcttgcctaaagtcatacagctactttgtggcagagccaggacttgaacccaccttgtctgactccagaatcctggtactttccactgtgttcctctccgaggatgctgcaggcaatgacttgactcatccagtggccatctctcagtggcttgatccttctagacttacttagagtctttcccacctagaaggtccctacccagaagtagctcccatctcctagacctaattctagccagtttcctgactcccctctctttctgatctactctttatattatttcccgctagccttctggaacttgctgtagttccctattgcctggaacggagattcttaactggggatcagagggaggggagggaaatcctcagaataagctgagaagctcagtattatcagggtctcatctctagaaatcccaattcagcgggtccatgaagggatccagatatttcaattttttaaacttttggacctgactctataatcacagcttccccataaggttgctgtcaatattcaaggcatctggtgcaacgattcagacatagtcaatgccccaaacgtgggggctattcttagaattattattgttatgaagccagtgatcaagtttcaaacatctcagcagccatctcagaatccagcacagaatccggccactgactaagtccttgttgagcctttctgcctaccaggttttattcacactttgagtttagtgtttttgtgttgcattgagacatgaggattctttcctcttatcctcctcagctcagcaaacctggtggttaaagcaggggctcatctagtacttaaggggatagaggacagtgatttttttaaataggaaaatactttttgagcattctttttttaaaaaaaaaaataaaaatagcccatagtcaaaaatagcagtgttggaaaattgccaactatcaggtagaacttctctttatgtctctcatttgaaattcctagagagagtatctgattggctcaattagtctatgatgtggcctccctttgggtcccatcagctgtgaacaggtcacattgtcaactgcccactcatcagggccaggacagggtgataaatctggaaggggaagttgggtgcagatatgaggtcactgacatatctggtatagatgttatggaggatcatgagcctggaggatttgaggacagcggccacagaaacctgacaccagagaagaacatatgtctaagaaaaccagaaggggtgtggaccccgggaactggttaactgaccctctacaagggtccctctgcaaggatttcctacaagggtacccaagaggcagggtggggaaggagacacagctgtggccctacctacagggagtaagtttaggttccctccatcccctgcccctaccaccaccaacaacaggtcctgccacaaggacttaagagcaaatagtgcatttgggatgtgctcccagaaaacactagcaggaagtgggaaagtgtgatgaaagaaaagaaagacaatcaacggtatgcctgcaagcaggttactgctgcgggcatctagggctccatcccactggaggccttagagggagactacgtagattctacatgctttagaattgtctagcgaagggagaagctagactgtttacctccatagcctgactttcattgctaggatgttaactccctagcacttggggcctctgcagactgagcatactttggtgaccagagaatgcccttagagagagacagagttggttgttggcatgtatgggaactggatacaggtgacctccagattaggccaccaggagatgggcagggcatcaacagcgtttacacagggagcaagactatctagtggaaacatgttcaaatcccagctccaccctttcctgggactctggggaatttatctagtcttcctgagcctcagtttccctatttgtaatatgaggacattaacacccacctcccagagagattgtgaaatttcagtgctgtaatatatgtaaaacgtttagtataatatcttatcatagtgagtactcaattaatagcacctatcatcatcatcattctttgtaattgcagaagaggaaaagagattttttttttctaatagactcccatttgtaacaagagaaaataattttgctcattaaattcatcgatttaatagatggaggcagaagaagctgctgctaaagcatcatcagaagtgaacctggcaaacttacctcccagctatcacaatgagaccaacacagacacgaaggttggaaataataccatccatgtgcaccgagaaattcacaaggtaagtcatggccagcacttcctcctttctatagcgtccagtcccatcagagaactaaggtttttttgtttttgttttttcatatgtgatatacaagcccaaactacaattgagaatcataaaatacggattgaaaaccagaaggagtaatgttactgttgaaagtggagagacaatgtatcaggatcctaaactgcttttgcatttaagcaatatatttaaccctaggcttcctgccagtccagttgcaaaggaatgtccagggattatcatttgaaaaaaagaaagcaaatggatgtctaaaaagaccctttcctagcattgaatttgtggaattgatctatctcataggtttttatgtatgtctcagtagggattgaactagagaccacgttatggtgaattgaccctcacttttttttaggaggaatgtaaatatgatataccccatttccaaaagagaaaccctctattgctacaaaattaaacattcatttgctggttgtgcgttcaaaattctctggcagatttttccccaaactaccacctgtctgagtgcctcttggtctaacatcatgcatgaagaacaaccaggttcattcccattctgacctgatgaagaaagctctgcgaatctcaaggaacatagcactagcttgcccctggtgtgcaatgtctctgacatgatttggcaggactctgagagcaaactgcctaagactgtgtgctgtgcagatattcagggtcgttgtgagcatcccgttgtgaatatcaaggagcctgccccctcagctcatctcaactcctgtatgcaagggcacagcggcttcacaaaagagcctcacttttattcaagtgcgcaggtaattacttggttgaaacaatagtgtttctgtgccacagagcacaggggatcaatttttatgtgccgttgccttgactataaagtagcttttgtgtggcacttctcccactgcatcgtaatgggctcagttagatggatcagctacagagtgtatgagctccaggtaaatgaatgagtttaccagcagaacataatcctttggcattgctcatctgcgactgaagaatgttttcaaagtgattattttattcttgtcaaaaccaatatcaagtcaccctttctgacaataattaaccaacaggtttggttgcttcttaaagttgcttcttgtaaatgtcagaatacctgagtgtgagtcctaccagtcactagtgtgatttttgaaaaattacttaaatgtcctgattctcactaactgcatttatgaaataaggatatcaacatctacattacagtactgtgcaggtcaaatgacctaaagtatatgaaagttcattgtaaactgtaaaatgcaatgcaaaaaccactgttcttattattactgttattataataaagttatgttattaacacagtgcagtagttctcaactgggcttcatagaacaccaatcttcggccaggcgtgatggctcaggcctgtaatcccagcactttgggaggctaaggtgggaggatcacttgaggttaggagttcgagaccagcctggccaacatggtgaaaccccacttctaataaaaatacaaaaaaaaaaaaattagccttagccaggcatggtgtcacgtgcctgtaatcccagcgacttgggaaactgaggtaggagaatcacttgaacctggaagcagaggttgcagtgagctgagatcatgccactgcattccagcctgggtgacagagtgagactgtcaaaaaaaagaaaaaaaaaaaaggccaggcacggtggcttatgcctatattcccagcactttgggaggccaaggcgggcggatcacctgagatcaggagctcgagaccagcctggccaacatggcgaaaccccgtctctactaaaactacaaaaattagctgggcatggtggcacgcacctgtagtcccagctactcagggaggctgaggcaggagaatcacttgaacctgggaggcggaggttgcagtgagccgagatcatcgcaactgtactccagcctgggcgacagagcaagactctgtgtcaaaagacaaacaaacaaacaaacaaacaaacaaacaaacaaaaaacactagtcttatgcaatgcttcatagaagaaaagctcagtagtagtgaaacatatttggaaaacttatattcttcttctggagatttaagaaaaatacaaattgttataataaaggttctaataagtcatgcaacccatacatacaggcttgtagaattttttaaaatatgacattggttaattctataaaaagctggcataagggaagagatcatttcatttggggagaggaattatttaggtaaaaatgtaaaagcatgatccttaccttctcagaactagaatttgattcccttctgcaaattagtacaagagtttccactttgtcctggctgcagattcctgtgatattagagctggcagagaccttaaagatgatgtagaagtgagaaaattttgaatcagagaaaatatattatttgttccaggtgacatactggatggttactggtgactgagacagagctcaaagaacacacatctcctagctcctgagccagcatcttttcttttctttctttctgtttgtttgtttgtttgtttgtttttgagatggagtctcactctatcgcccaggctggagtagtgcagtggcacgatttcggctcactgcaacctctgcagcccaggttcaagcaattctcctgcctcagcctcccgagtagctgggattatcggcacttgccactgcggctaaattttgtatttttagtagagatggggtttcatcatcttggccaggtgaccaaacatcttttctgtccttcatcaccaaatcagacattagacgtgacctttcatggggcaggaagagcctgggttctatgttagacttagctttgagatgcctgcacctggttacagaatcagaggcagacaacagatacaggaatattggaacaagtctctcattatacttaagcactttcttgatgaaatgaagccattcactagaatcaggtagggctgctagagctaaaacctgcttgcttttcatgaaagatgttcaactagacacccggacttgtaatttgtcaagaataaagttgacattgagtttcaagtgatgagccccaagaaagatagaaacagctgacatctttgagcgttttgctgggtgttgggcactgtgcggagtgatttctccggatcccctcatttcctcctcatagcaaccctatgaggctgactctgttaacatttcttatcactgtgcccaggggaagccgtccatctcacagctgctgggggaactcagaaagaaagcggggtgggcatttcgactcctatactggatgctcctgcttcagaaaatggaaaacaaaacacaaaaacaacttgtggaatttgtccagaattccttctattttactttcattgtacctgttttactgtagataaccaacaaccagactggacaaatggtcttttcagagacagttatcacatctgtgggagacgaagaaggcagaaggagccacgtaagttgtcatttcccctgtacttgcaccccgacacactcactttcattttcattcagtttgccaacggtgactcagatgcagaccatgggcaggagggagtggagtctcctgactcatttctaccgagattcctcaattcctacatttctgaccagacagatgtagtccagtaataggttacgcctccatgcacttggcatcagaaacaacagataaattaaattgagtggtcatttgcatggcccatctcagctttgaaaggggtacaagcaagtaccagacatgttgactgggactttggtgacagacctggtatatcaggtggtgaaatccccagagcctctgggatggctaccccttttgtaatcccacctctggtcaggcagtttgagaacaagaacaccttatgtggagcccaatggcctaaagggaaaaaggctgtccgtccatttcagggctaggctctggtcccctgtgattgcttctgttagttgcctgttgcttagtccagaggcagaatggatttcacagaattatagagtcataaatttggaaggggtgtgatttcacagaaagaaaacctgggcacaggtcgggggatgacctggttggagtcactggtctcctaactcccagaccagaggtggctcaactgcacttcatcttcccaaagatgtgctggcttcggatgcacacgcctgctgaggagtggccagtagggaaagtgtgccttttttatgaagaccgcaggaagccagcccccctgtatccagatggcttctgcatcctcagccttcccagggcactgaggattttccccacgtcttttggtctgatggctggaagggaaccagtgtatggatgacagttaggaaggtggtgttgtcttggttagtagctgatggattttttcccttgtttttggcacagtgctcaaatgtcgggagctggccgacttttacagcaggctgggggtccagttggctgtgtgcaatggtagtgacccaccattcaagggagcctgggggtggggggaggaactgtgcagtgaagtggaaagggcactggctgtggagtctagaagccccactttgtcacctaccagctagggcacctcagtttccccatcttcaagtgaggtaacaatgtccatcatctctcccagccctggcagcacagaagcctctgaaacgaagacaaggttaactaaggcagggatggaagagaggccagcttccaaaggtgggaagagacagaagaaagcgaaacaaaaaccagccagccataggatatgatcatggtcctagagggaagtggtttagagtgttccagatctcaggctgtgtttggggtttgatgaaggattgaggcctgagcagagttgtagaatgaaaagggcaggggaagcagaactcacagggttgtgaattaggaaaaaagcctttgttctcaagtcaaaaaaaaaacttaatctatcattgcacagtggtacagccgtgctctggggagggcagcagccgtgcctgtgagcacatctgcacctgctggaggaccaggatacatgaggctgccacatgtgcatcccatgctgccccctccaccctttcaacgaggcagctgtgtccagttggtgccttttagtcaggggaattgagactctgagagtgggatggggaagagacaagatcttgaacatgccaacggcatgcttgggcagaaactggttgcctgcacttttgtgctgtgcgtcacttttcccaagcatgcatggccttgtgtgcccctgtgtactcttcttcagatctcatctgggaggcccagaatctccacacctgcccatgcagtctcctgtggccattgtgtgatggaggacacaccttggcccccttgtgcagggcagaatccgaacccccatatatgacagtcctgagaatgcaggtggttgaggggagcggtagatctaagtaccccacgtgctggaggcttgccaaggttgtcttgatgcctgctcagaccctcaggatatgagcatattgggtttctatattagactaaattcccgtttgattaactagaagggagaccgggggcatctgatgcttgactggccagtgtctggacgatcccacagggctttggagaacagattggagacttttcaagccacctgtgagagggatgtcatatggcagagaatgtggcatgtgtgcctcactacagagctgcactcattgtcgcagtggcttgcccagagtcagggaagtgagatctagtttcccatgtccacagaattctttcattcaaccaccttcctattcctgggcacagttgacctagggcttcagcatcgtctttacagagacacggagctctttttctgaatagaaagcgataaagactagtttactatcaagggaatgcaggggactgtgctttgtcaccactgtctcattctatcattttgcaatttaatgatttttacggttggctctgaaatgcattacacactgcagaaactttctctcagagggaagagggagatttgccatggcaaaggacaaatcatatgctgtgtaaaccttaaaatactatacacaggagctaaattttcaggctttaaaatttccagatgaattcaattaaaagtaatcaccacacaccctatactttcctttcttcaaatgctggaatgtgtattaatatgtatggtaacccaaggaggctcacagaaagttacagagagtaacactatatgcctgtctagaaattgcacgcagtatgtgcaaggccctggtctgtttttacactcaaatgtgaaaggggaaaaggacaccgcagcatgttattgcacctgagcacatcggctgatggggatgtggtctgacgtctttgttgtgaggcttttgtgctgcacttgccgcctgccccacttcacaggtcagtggcagacgcactgatgctgtgctgcttttgtgctgggggtgaggaggaaagcagcatgtagaagctagagcatgggcaagccattgtgcattaataggacacttttatttatggaactgtgtccccacataggaagagtctggcccaattagccaaggcacccttttgatggcacacatcctctttaaaatccaactcgcagctacaaggcttagcatgtcctgcatgtgttgtctttccggtttcacattagaatttgatgttaaaaagtgagctggtttgtatctaggtgaacacacctagtttgaagctgtaagttcaatcatgtacaagcaactccaagatactggccaagacttctggaaggctgggtacagtggcccacacctgtagtcccagcactttggagggctgaggtgggaggatcacttgaagacaggagttcaagaccaaccggggtaagaaattgagacccctctacaaaaaataaaaaataaaaaaaattagccgggcctggtggcacatgcctgtggttccagccactcaggaggctgaggcaggaggatcgcttgagcccaggcggtcgaggctgcagtgagctatgattgcatcactgcactccagcctgggtgacaggaataccctgtctctagaaacaaacaaacaacagacttctgaggccacaggtggatggattttcctgccaaaagcacccagcttgtagagatttgagtgacccagtgacttccttgttccagtgctggtggtggctttttgactgggacagcagactgaggacagtgatcatggagttcccgacaagtgtgagaccgcatgttgtgaggatactttgcctgttaaatgtattggagcctggggagaatggggtgttaagccgtgaccgtcttttcccatggagcagtgagcacccatcacctccaagcccagagagaccaagcgagaaagtgggagaggaaagtgtatcgaacaagcgctttctccctcaggtctcaagttcttccctgaccccaacttgttcatacactctcgagtggggtgctggctttgttttctccctgcgccctggtttttgatgctggactcaatccatttaatggagtgtcagaaggtaacatgatgaggaatcgctgggggcttatgattttaacagaagtgcaccaggggagggtgcggcacctctagagggactcaatcagttcccagaggatctgcctcctggggagacctgcaaggtccagggaggctagggtggtggctgagtcccaggaaatgcagcccttcccttctgtccattttgaggcagaatgaagaagtttgaagaaggtgagatgcagacctcggttcgagccctgcattgccttttacaagctctgccctttgtgactcggtttcttcagctatcaaatggggctaataatccccctttcacaagactgagtgagaatctagtgtggcaaggtttataaaggctctttgtgtgaggttcattattactgaagagtaattaaaactgggttctaatttgctggttcccagcaactttacagaaaaaagaatggcatgagactggggggagatgcgaaaggtctccacaggcacaggcgtctttcctctgacatttgtagcctcgggctgctttcattctgcagcagcctgcctcgctctctgagtgatgtgctctgccaggagctctgtgttcctggccacaaggctgactcatcccgctgttgttcctaaccgtgcctgtcctatatgtctaggttgaggattggggatacagacaaagggaaggataggtcaaaatgaacgaccaggggactaggcgatggttgggtactgataagttccaagttggggccccaagttggcaaggggtgatactggtttctgcagaaagaaacagacttattgtcctaaggttgatagcaaaggcttgtgtgaatgttcagttccatagtctgacaaccacacagagtttgggtacatttgtgtttcgagatttatattttgcgttgacttcgtgatttatgtctaaatataaggcccacttgcattattcagtaggaaaagatatataagaaaaattgaagagctctgtatcattctgagaaatgggtaaataattcccaaataaataaagttgatgtgggtgagcaatttttatggggtaggcatttctttttgtgctgctacctggtatattaagttgtactctcctcaacctcaatatcttccaagaaagaattcattaaatagaagcgattccacatctaaaatcaaaatactttggagttaatactgtggagatggtataaaaggttgtcttcaatcaaacattaagtgaaaaaaaattgcagaacagtatatataatatttaaagtatataaaatatacatatatggtatatgaaatctcttagttttagaaaaaagtatgcataaaaaatcctggtaagacatatattaaatcattagtagatctttccagaggattttaagcttgcagagaccctttatagatttctttattttcaaaagagtttgtgaatttacaattttggtctaaacatctctatatttttgaatggttttgcaaatactttcagtgtaaatgctagaaattaaattgctaagtcaaagggtatgcatatctaaaattttgagagatactgacaaattttcctctaggaaggctacacccattttatttttagcatcaacttctgaggctgtgtttcaccagccctcacctacagtgggtgttaacagtgcgtgatcatatgataggcaaagaaaaaagatatcttcgttttgtttatatttctttgattattagatcaaagaaatataaagatcatttgcattgctataaaggagtacacaagcctgggtaatttacaaagaaaagaggtttatttggcttacagttctgcaggctatacgagcatggcaccttgtttatatttctttgattattagatcaaagaaatataaacaagggggatggctgtttgagaactgtaaattttatcaaatgtagagtctgcaaatttatcttatcccttcttttctttgtcagggagaaaggtcagttttgcattccaggccatgcccaagagcaaataccaagagcaaataccatctattccagtgtgaggtgattagggaggtgggaagtcctagcaggaacatttgagtgctcaatgtctatgtgaggcggctgatgggctgagtcacagagggtgggtggtggggacatgcaggctactgcctccacccctgcgaatacagacaaggtttagatgactgctgatagaagcagcacttcagagggggtggttaacagctcgggcacaggcagatccagttcaaatggcaattctattgcttattagctgtgtgcctttggttaagttcctgaactgctctaagccttagttttcccatatgtaaaatgggcttaataacagtaccttccatatagtattgtcatgaagataaaataaaataacccaggtcaaaatattatacaatacctggaacataaagagtaagaagtcagtaaatagcaggcatttgttatgatttgattattttggtagcccaatccttggctatcaaaattatcagtattaattcattcatttatttgcacattccttgagtacctgctacgtttttggcagagaagtgtaaaagacagtctctaacatcggagaagcatccaggctatagtggacaaaaaaaataaacaagtcattacaatatggatgcataattttgaaaggcaaaggttgcacagggcattgtgggggcatggtgcaggggaaaaccaggtagccatggaagacttgcttgggagacagttctctacgggtctctgtttctgctcattttataagcaaaggcacttctcagtccatttgcattgctataaagtagtacacaagcctgggtaatttacaaagaaaggtttatttggcttgccgttctgcgggctgtacgagcatggcaccagtgtctgcacctggtgacggcttcggaaagccctcactcatggcagaagatgaaggtgcacaggcatcacattgtgagaggaagtgaggggagggaggagagagacagagagagagagaggagaggtgccaggcttttttctgtttttttgtttttgtagagacagtgtctcactatattgcccaagctggttttgaactcctggccccaggagatcctcccacctcggcctcccaaagtgctgggactataggcatgagccactatgtccagcctctttttaacaatcagaacacatgggaactaatagagcgagaacagcagcaagccactcataagggatctgcccccatgacccagctaccttctgctaggtcccacctccaacactagagatcaaatttcaacatgagatttaaagaggacaaatatccaaactatatctgacactaattgatctcttgttccaggccatcttttctaggcggtggccttgaaaaacagagctagctctccctccttggcagagggcaggtttgcttgcagtccattatcaaaggtttgggttctctgagcttgagatcccttaggtgtgatgtaaacccaatgcatgtgcagcatccgtctggacccctccatggggcagtgtggaacctgcaggcaaggagaactgatacagacaagaggcttatgctgtttccgtgttgctgaaataaagtcctttgtctctgacccagaagtctcatgtcttctgctagcagccatgaaaccgtggcaggaacatgtatcatcttgcaagtagaatagaatcttagacccttcacacttcttgacaggctccctggaagaggtggcagttgagctgtattttgaatgttgtctaggaattctcagttgtggggaaaaagggtattcgttgaacaagtatttcttgttcaaagtcaaggaggcatgtggaaataagaatatgttggaggaacgctaaacaatttagaatgccagagctggagatgtgcgtgggggagcagcaagtaaagctgggggagaggcagggatgagatcaggcaggcctttgagagccatgccaaggagttaggaatacatgctgagttaggaacatatcctgcatctgcagtgctttaccatgtcctgtactgtatactgtaatgagacttcatgcaatccctagaggaaagagccaggaagatgtggtttggaagacagacattcgtggcgatggagctttgcttaatcctgctgaagctgaaggcttgagcccctttgggctgcaaagcctgtaccctgcaaaaagcctggcttctggccttgaaatctggaaaccgttacttagaaatggagcactttgcttttgcttggtgccagtagacaggacagataagtgacagtaattgaacttgaactctcattaggttgatggtgtcggctgcagaacaagctgatttctgtggtctctgagtagcctgggcatgtcaggggcccaacagctcctccatgcaggtgtgtggctgtccactgctctcaggacctggggattcttccagacaagcctggataactttcaccatagggtctttgtatcctggctgccaaatttgtggccctgtccttctttacctgttggcatcattccaaaaaactcattgagtccattttgttttgtttttaaaataacatcaagggctacaacatgtcccagtattcccttatttagtcaggcgctgtgccaggcatctgacttgcattccttcacacgatccacatgacaatgatacaaggcagacacccagttgaccccattttacagatgaagtaactgaggctcagagaaaattataaaacagaacttgtaggtggctgagccagtactaaaaaagagaaataaaatgaagcacttaggtcttgtggattccaaaacttccaagactcatgttcttaatgcaacatacaaaaaattgtgataaaatgtatataatataaaatatcatcttaacaatgttgacacatataattcagcagggttaattatactggagaaaagaattctccagaattcttctcatcttgcaaatcagagatgctatacccattaaacaatgcccccctcctgcaatcccctggcaacctccattcttctttctgtctgtatgattctgaccactcaaggtacctcatatgagtggaatcatactgtatttgtatttttgtgactggtgaatttctcttagtgtaatgtcctcagggttcatccatgctgtagcaggtatcagagtctcattcctttttaaggctgaatgataatacatggtttgtgtatatacatagatatattcatatattcataccatgttttgtttctccattcatttgtcaatgcacccttgggttgcttccaccttttggctattgtgaataatgctgctatgaacacaggtatgcaaatatctctttgatattctttcatatcaaatgctttcacttcttttggatatatacccagaagtggaattgctagatcataaggtcattctatttttaatgttctgaggaaacaccatactgttttccatagtggctgcgccattttgcattcccaccagcagggcacaaggtagaagtttttttttcaacctttcagtcttcatgactgtaggcactagaggacataagtgcccaatgtaagctgaaggactgtctcaaaattcctggcccctgctgtccttggataaggcagtgcgttccccaactctgtttccagcggttgcctctgcagtgtggcagccatagtctcagggagtgtttttaaagcttaactgatgccactgacctgagtttctcacccctcaccctggtctgtagccaacatgctgaaaactttccctaggcctgggcgtatgcaggctcaggctgcatcgtggagattgtggggatccagagatgtgatttccttgaccattcaggaattaacacccactccacaccctcctttatgagccccacccttacccctccatggtgtcctcaaagactccccagaggcatgaggggcctcccacttccctgtaaaggggctccagactcccaagaggtcctatgggggactcaggcctccaaggaggttttgtggtgatgatggttgtttatcaattcccacctgtggtagcgagggcttcccgggaggtaggccaggggacagtgccaacagaggccccagtcacaccgtctcctcttccagggtcagagcccggagcagtggaagggaagtgggtcaggatgggaagcggggaatgcagaaggacatgtttaatgctcccagggaattcacagtcatgcccccgaatctaataaatgagctggtctctccaatcaggcaggaaacctctactcttggtcacatccccagcagactatgggaaaaatgatggatggagattgagtcatctaaatgtttgttcagatctcattgctctgtctactgtcagtttcatttttcacctccacctcctggaagagaaagaataaacaagatatttgggtacgttttaggggagcatagtggtagaatttggaatccaaactgctgcaagttgaaatccctgcttctggggaaacttccctcatggctctgagcattggttgctgctctgtgaaaagaggatttaatgactgcccgaggagggtattttacaagtaggaggccatgtctggagaatggtgtttaatagatgctgaataagtgtaaattctcctttctgacctaatttcctggaccccttgtggcaggaagcagtagtttactgaatttgagtgtgatgaatcagtaaatatgtttattttgttgtaaggttgctgttgctttgaaagagtaactgagaaggcttctgaaagatgatggtggctaaggtgctagaccaaacagatgaaaaagctatttgtgtaaagacaggcctcatgccaaagataaagtaaaacagtatatcactgagtcacacaattataaatggtagaattcacagggtcccctgaactcctctgaaccaggaaggaacacatgtggcccatccactgccataccccacctccgggcacatggcagacattactaatcaattgcagagttgtttccttatgagcccagatagcctcagcacttgaggcagcacagcacttccaagcagcaactgacagttgggaaaggactatccttgaaacctgtgttccacccctgcttcagaccaaacctcctgttttacagatgagaaatcagagatgggagggatgtagttttctccaaatcatgcagccatcagatctggaaacttatttccagttcagttcagtttttagtgcatggtggacatggaatttcctttttcaggaagcagggtcttggtgcccttgtttttatcatatctcaaaaaattaataattgagaggatgggccacctaatgctgagaaagatggtgaagaccagctgggaaagggtgttctcaggcccagggaaaaaatttagaagttcataaaggattgtctgaagactgaactctggggaggcagggatttcacctgttgtgtgccacctccgtatccctgtgtctgtgctggacatggataggggttgagtagttgaatacatacttagtagatgaaagctgtgtgacctagttgcaaattggggaatagaaacggaagtaaaattccttgaaggtaagattctgtaaagagctgtaagtatgtaaatgagtctgatttgtttaaaaaatgaacctctgtttttcttgcctttgttcattcatctacattgttggacacctactgtttgctgggctgtatacccagtgttttacgtgttttctaattcttaaaacactatgaagtagatataatattattttatagatgagggcactggagtttaaagaagttaaattccgcaagtcatggcagacggtaaaatggtagaactggaatatgaacccagttgtaaattttggccatttcaattaaaagatatatttctgataaagtcatggtggtttgcagccataatgttgagttgttttgatccccagccttccattcccgggttacagcttgtgtcattaacatcaagagtcattgagcccctcccccttccaaaggcctcagatggaaaaccaacatcacaaaaggacaactgtatggttttcctctcccagggatggcagagctccttgggctcaggggagaagatatcagtggaagatggttaggaaactgtggaatctcacacctactttcttttgttctcaccactgatggggtgtcagacttgctgctgctgaaaaggaacattctaaaccagtagaggggcattttaagtgggtggcatgctcccgtgtctgaagaggttggccattgacacatttcagtgatgcgatgtggaaaatacagccacagggaaaacagcctgaattttccatagtctcataattcagggcctcccagaaaggaggcaggaacaaaagagtagtggctaggatagaaaaacaccctggcttgaagatggcggaggggcctgccctccaggccaggggtacccgggtggctggggtgggcagaggccagcagattccatccttctcatgcctggcaagcagaacttaggctcagccccacgagcaggagattcctagtagcctttgctttttccattgtttccagggtcctccctttttgattaaatctatggggacctccttccccagaaagaacatacatcctgtagcagaaagttcaaatcaaaggccagaagtcatactcagtgcttgccttgtgcagagctgctctcctctccccgcatccccatggttttgctgggatttggaaggtgagaggaaggaaagagaacaaatattcattaagcacatacacagatgctgtgtgaccatttcatatgagctactttccttcactcttaccaaacccacctacaacacagtgtactagccctgagttaaagataaggagtgaaaagctcagagtgacttgccaaggtcacccagctagtcagtggcagagttgggatttacaattatttccaaataagtctgtcttactccaaagcctagactccttctagtgcactgaacactgccttgcaaaatgatcagatggtgggaaggtcactaatagtaatggaatgtctggtacatgccatgaaatgtggtcatacttatcacccttaatctttctgacaacataactggttaggttttatcatgcccattttacagatgaggaaactgcaacccaatgaagttaaatgacttacccaggcttgcccagcaagaactgaggaagagagcttggggagctcactgtcgggggagcgggtcattttagagccttttgtctgagtcttggcttggagagccggggcaaccctggtggtgtggccgggctccttggtgctggagcacaaaggaatctcctagccccagccggaagcaccaagaccattatgaggatgggcggctccagggtttctggggcaggaaacttgggtgtgcccagaccaccttccctagaccatctgcacatggcctcctccttggagctggagttccacgtttcttgccatcccacaaaagtgaagcaaaatttgacgtggcctcttgtgagcaaaatgaggtcaaagcatatgtttttccaccactgaaacattaaagtttttcccaggctcattagcataaacgattcaacttgaaaagttaaaaaattctgggagacccctttccgtcctcactgtggaagaactttgtgggtagtgttgggggcaaaagaaagaataattcctcagggcagggaagagactggaaggcaggagattggacgctccttagaggctcagcagggaatcccaggcgccgtcccccacccagcagccctgccagggggctggggaagtgactttttttctgcccaggggaaaacaaactggtttctgttttgttctgctttagattttcttcactttttctttttttttttttttttaaaggaaattgagcaaattctttgaattgaatttataaagagggcaatggattagggacactgaagcagtggttgttcagcttgggcatacagcagaattattttcttaatctggatacaactcatgggaaaagtaatgcgtttttattttcacttacttttaaattaaattgagcacttcctttaatctgaaatgtggacaacaaaccacaatatttgcagtacttcgtaccaatagcaatcacaaatatttttattttctcttactgttgttatacatatcttaaaatagcatttatgctcagcacttagagatgaagagagttgtcagagttgccgataggtcttgctatccagtgtgttcataagaagcccataaaatactgtctctcaaaatattttgataactcgacttcaacacaaccatttttctttgtaatcctgtatgtttacctttattcatctaactctgttatactgagaacaggagaacaggcttcatctaggtgttaaaggggtccctagtacaaaaaaagttaagaccccttattttaaaaaggccagtgtccacactgggacctcctagtcactcctcgtcacagagacagacatggcctagtgggcagcagggaggctgtagaaggatctgtctgttgccttcattggagtgacatccccaccattgtagataagacttaaccttgaggttcctcgaatcatgccagcttccccattcaggtggtttgaatcctaaagactatgaagagccattttgaagaaactgaaggttgagaagattctgattaccagcattgttgtataggcattgggtcgggggttggtctggaaaatgctgggcctgggctctgtctcagatgtaggagtgcccagctcatcctggggcatctcccagatggaccatttgacagcagcgtagcccagataggggcctgcactgactcctgctgcccacaactgcagccaaggctgatcttcggtggagaaggcctctgtcctgtggctgcagcttggcagcctgaactgctgcgtgaagcatcctctgactcccttctccctctgcagcctgtcttacccatggcatagctggaggatgcagacatgacatccagtggagacttgtgatatgtcaggagggattacaggtcacagcccctggaaccttgttcttcttgagagatttcacctgccccaccgaaggctccagccctaagcctttgggatggacagagaaaatacaaaatatgatgcagtttttgtcacctcccagttctctcaagtccatgtgcctagggactgtgtctcagaagcactgtctcctgaggaaccagctcttgcataggtgctatctccaagtgctgagagtgtggagggacttggcacatttattactttcttcccaaggcaaaggaaaaccaaatttaagagactgagctaggccaagtcagctcactgactcatctaaaaagggcaaacaagaaaccaattgagtcaatctggagaaactctatccatccccaaggacggggtagtgtcctgaatgtgatcaaaatgaggctgggcagtgaggacactatcagagcctgcttggctttttgtaattactgaaaaacagaagcatgcgcttccaccctgtccctgaatcctgcccaattcctagccctcatcccctgcatcattccttcccttgcatgaatgaaggaatagcacaaccaatcccgtgaacagtcctaggcttatctgggtgcaggtaaatcatgagattcactctaaacttaatcccattaattgccgtgtttgagagaaaggggatttcattagggcctccagaggagttttctgagggaagagatacaagctctggccaccccaggaggccctgtatggaccctgctcaccatggttgtggcgggacatcgtcctcacttgtggcccgaggactggctgtgctctccctggcccatggaagcgggaaggcccagaactctgtggccacggccgggcgctgctaccctccacggctgaacactattagcctggggcagatgtcagctctgagaggtccgccaattctggtgtgtcccaaaaagtggctgagactggagactaggagatgcaggatatggatgaagcatgagccagagtgctatttgcaccctgaagccagaaaaggaggaaaagatgatggagatttgtggaggtagctgagtgtctggagaggctggggtagagcaggtaccacccttcagacagcgccacggggaagctggtgggacatgtttctgccaacttgccaactcctaggagacctgacgtgtcacccagaccctttacccagcagggcctgtcatctcccctaggagggcttgttatgattccccagacctctctcctccagtgtttctttcaggaggactgtccccacgcccctgacacatggtgattagggagcccccgtgactccgactaccctggagcgcccacagcactccccagaggcagctccagatgtctgctgttcattgcccagaacgcttattttttaaaagaggccctcaccatggacttccagcatcaccgggggcaatgctgggaatgggggtggtgctttcctcagagaccaaccaggaccatggggagcacctgcagcagctgatccagagaccaggacatccacaaggacagatatcttatgaaaagtcctcaggttcataggaatgctaactctgctgggggtgggggagctgcctagccatggatgataatataaacctgtttggcctggagagcaaccaagaaggcccaggggtcctagccaaggccaggcagggtcaaagtagagatggaaaagttgctgacatcagtcatggggctataaagtggaggcatagagagaaggctaaggcagagggatatgagacaggccttttttctctagacggctgtgtgtgattgctgagggcacaaaccccaccatgattatgcttctggttagccttgctgcaggggagcagccccacccccagccccgtaagcattggtgatacctgccaagctctgagatcatcaccttcaaagtgcccagcaggaaggctggcaaggcagagggtgagtttggatgcaccgtgttctgggcatctgttacccaaacttagcagtataaaacaaccgtttattatgttcctggattctgtgggttaggaacttggacaggtaccatggggatggtttgtctctgctccgtaatgcctgagacctctgacttgaagccagggtactcaatgaccagcgctggagccatctagaggctcttttcacccaagctcctggctgttgcctggaaccctaggcagtgctgttggcctccccatgtagcctggacttcctcacaatatggtggcttggttcaaagggcaggcacctgacaagggaaagagccaaatggaagctatgttgcctcttagaacccagctgtgaagttatgcagcattacttcctccacagttagttcattagaagtgagtcattagagccaagtgctctgctaggatgaggacggtatgattgagggctgggcatgctgccttccagccccctgctattttctgtttctggaagcagtcccttggtcgaagaagctgtgagtgctctgggtggagaagaggccagtgatttcagtgcaggtcttgggggctttagggactgaggcatttccctccttgggttgcctggaaacaccagtgaccaaccagccatgggtcgcctggacaggaccacccctcagagagaaaagccaactgtgggcacttacagccctcccatctgaatcttgcctttcccagtatgagtcttggcatgtcttataaccacctgttggtccttgaaccctgaactattcctctcttcatcactccagccctgagtacccaactggggtgggtactcaggactggggagcacccaggagagaggcgctagttgcccagtgggagagtctgggaaggcttccttgaggaggagacatctgtgctgctccctaaagattgattgacagataagggaggtaagggcattctaaaagcatgggccaaaaatctgggtcctagggaggtcagaaaaatcaggctggaaaacaggttgggagctgaccaataagagctctgtataccatgcagtttggactccaggtcatggttgctggagtaggtggagacagtcagttgtgaggtagaatgtgctcagggtgacagtcttacaggaactcatgaccttggtcagtctgtgagagtccagaacccgtaagccctgcagattcagagaccggacctgctcagcaatcttgctaactaaattctgacctcactaatgtgtaaaccaaaagcacaggctattaatttgcagggttgaggaacatctctttccatgtggggacccccatccgggatgctccctatgtggtgtcagggtcctggggggcaagtttggttttctgtaggttgctgggtgagtgagaattagagccgagggagcttgagattgttgaagggaagtcatgggttcccgggtgcctggtgtagtcagagcagagagctgccacagagctccaggcctccctctccccgggtcactgggacacaccttttgttcactccctctctccttgtcacattcttttatgatgtcagaatcacagatgcgggctgactgttcccagggcctggaaggcaggctgtctcctccgattatgtgttgactgaatttgtgcaaccctcagccttctccagggcccctcggctggagcagctttctgaacaattatgatcagggacgtgcataatcaagtttgtgttttaggcagataactggagctgcagaaaggagtctggtggagagggaggcaggctggtggctggacgctggcctccttgctgccacattgtgcataggatgaggtatgacttggtgggagcatctgtgagggtagcaaaggcccttctctgcctgtgaggaaaccccaggacagtgagccccaaaccaccagagtccctcctcaccaacttcctggccttagcaggagctgggcaggaatagagacttctcaggagggtagagttaggagtgaagccagcttcctttctctctggcactcatctcctgggatccacatccggattcagttcctgagaacctggtgagaacttggctacccgcctgtgaccggaagcatttctcccggagtcacatgggggacttcacactgacctgggctggctctcctgctctgcatccagacgctgtaggtcccgcggggtttgcagcctggagtttggagcagctgaaaggcctgtgggccctgagcagatacagcagcagctgtcagggggctgctcctgccaaggcttccccacccagcctccatttcctgacacaagggtaggacagttggagctccctgcgggttgggaaacaaaggccaaggcccctgaatggatgggaaaagtcaggctggggagagtctgaggttctcgctgttgtgattcatgcctttccttgcgtcggtgaacctgttccccacctctgtagctgctcttgttaccgtgggatactcagcctggccatctttttggatcccggaccccatctgctgcctgacctagcaggagagccagctgctgcttcacatcccagctccagcactcactagctgtgtgactttggcaagttactcagcctttctgtgcctccatttcctcatctgtaaaatagaaaggaatagtaacagccctctctcagtggagtgttttggagatcatgtgagttaatgcttaggatgcaggacagctctgggaataatatctaggaagcaatataaatatcggccattatggctatgattgtttcatgacaacccctgttatcatacacaatccagaggcttttctccaagtacagaagctgcacctgagcatggttgctcacacctataatcccatcactttgggaggccaaggtgggaggatcacttgaagccaggaattcaaggccagcttgggcaacatatagagagaccccatctctacaaaaaaaagttaaaaacaaaaccaaacaaaacgataaaaaaaagaagaaagaagaaagaagaagaagaagaggaagaaaaagaagaagtggaggaaggagaggaagaagaagaggaagaggaagaagaagaggaagaggaagaagaagaggaagaggaagaagaagaagaaaagctgcacatgctcacaaagcccctgaagcacaggccagaatctggggtcgtgagtgggtacggggaggaagggcagtgcttcccagcctcctccctggagtggggtcaggagcaggcaccctgatgtccttgttggcttatcttcatggatgtctttgaggccacctctctttctgtggccaccagcccttccttctcaaccttctcctgctcaaggccaaccccactttctctcttccaagaaatgcacctgttgaatcttcacattgatcggattggcacataaaatacaagacaccctatagaatctaaaataatttttggtatgagtgtgtcccatgtaataattgaggcatactgtatgaaaatattattcattgtttatctgagattcaactatggctgggcatcctataattttatttgctaaatctgacaaataaaattcagctaaattatttgctaaatttggctaaatctcctttaatctgtccaataacctcatgaggttccccactttgaggcccctaaacaaagaggtcccatgcaagtggaataaggagccatggaggaggcagcgggtctgggagacctggaagtgctgctggacttgtcagtgcatttgggcctgaaatgcccatcagcctcctgatcttctgcatatggagtgctaactgtggactcggtgtgtctggggaatagaccccggccaggctcagtggctccacccacacagcgtgcctttggataggtggtcggggctgtggagaccctaagtccccggagaagtgttggggggagtgggtagagagggctctcccaacggctgccaacccaggtgggatgacaggcacttggatgagtagagacaagctgcttcctttggagttaaatatgcgtctaacttctccagaggaaatgccactcaggctgaaagaatgttgggaggctctgtgtgtggagggctggctctcggtggcctggcagcaggacaagattcctggaggaaggaacaagcttttccagggaccgacaaagagagaaggctcccagaggagctctggaggtgggagctgtctgtatatattggaaggagaagagggaggataggaggagagagagaactccaggactctttcctgattaaggaaggcatgacaggcactaaagggttaggagcagtgttctccataccctggggtgccaagctctgctcgggggtgcattttcctctttcctgggcagtgtgacttgggggaagaaaattggtgggagcagccccaggcgagccaggcctttgcagacattggcactttagaataataatagctggcactgatgggctcctggctcctgcctgggtttttccacagggcagtctctgcagcgggtcaggctagagcccctcagtgaggtttggggcccccaccccctgagctggctgagagtttccagtgtagcatccaggaaagactggaggcgccctgctgcgttccagacaaatgtgcatcttacaggctcctgcgactggcctggttttaaggtcaaaaaaggactctcaggaatggggaaaacctgacttgggaatcctgtaggataaaagggaagcttcctgctgctcttcctcagggcactgttgctaatcctccagtcaccttgtgccagggccagccttgtggaccctgccctcctgcagcaggcacagctggcagtgctccacctccctgagagttccagagttccctcctgcctcacact

SEQ ID NO: 946 - DNA, 32744 bp, Homo sapiens
  source 1..32744: mol_type = other DNA
tagtaagacaggtgccttcagttcactctcagtaaggggctggttgcctgcatgagtgtgtgctctgtgtcactgtggattggagttgaaaaagcttgactggcgtcattcaggagctggatggcgtgggacatgtgcaaccaggactctgagtctgtatggagtgacatcgaggtgagctggggcagggctcggcgctgcagccacaactgacgcttccctcagatgctattattcctgtaaggggggatgggcttgggcaaagagaggagccaggaaagtagtccaggcaggagcttttagaagaatctcaatcttatcttaactccaataagtttgctattttaaggtggctctgagatggcttgagcaaatcaaagcttagctgctgtcatcagtatctgttgcagttagaaactctttccatgtgactttggcactgtttctactcatatgcaatatttatgctctaagatattgatatgaatcagaagctgaagtctttccagtggtgtttagtggcctggttggaaaaatgccatttctatttataataagacgaagataaaaatattaaaatggatgtgttcaaatatagtccgttttgactctagtccggatttttcccccctctctctctgttcatcagacagagaacttacaaaatcctaaataatcctgctgggctattttagattgcttttcccacagaacacaaaacaacgatgctgcttcctttaaaactcctatacgtggttgaaagatttggccagcgaataaaaagaaacgcctggcagtgcaaggttttccgttcgcgtcggtggcagggaagccaatggttaaatcttcctgtaccacggagagctgcctgaagctgagagagaatagagtttatgcaggactgtgtgtggagctgctcgctgctagtgtaaaaatagacagcaatacatcaattccacagtctctgctggctacaattcatacaggggggaaaataacgcaagcagtttcctcgtaatctctggagtctagtggggggacggaggacctcggcgtgtttgcattcagcacaatggaatgctctcggaaggaaagtttgggcaacttgggaaacaagcaaaactttctgtggactctggtgagatggactcgaattgaattgcatggaggatcccagctgctaacaatgaatctggcaaaagactgcgagtgtttcctctgggtagctgggggcacgtagggtaagggggaggatcaagcccacacgtgatttgattaaataagatgtccatgtggtgcagcgatacacatctaaagtgaaaataatttggccaaggccgtctgtgaatgcatttttcctatctagcgaggcatgcccgggattcttaactctttgctgggtttgcaaatgttggctccatttgccctcccttgccttggtagatcgtatttgtggattgtaattgttatcttgttctgatttcttggtaaggcggaatagatatggataattcatatgccctgtagccattatgagtcagggttataagtggcttcaaagtcctaattgcctttgagtagccggagtgtcctgtgggtggttgtctggctggcactgtgggtctcagctgctgtagtttcatttttccatcatgtattattcctgatgctgttaggagttgattgaggaactagatcatatggaaataaggaagatttattttaatcattggaattcctgcagtcattttcaaataaacatcagaagcatttagaatagtggcctttaaatttttttcttaaggaggaaaggtcttggctacttgtccagccatggatagagtcgccagtcggctgagattggccagtcacttctctgttgcactataggcagctagctgctagaagctttgcctacatggcagcggctctgggaatcacctccgcctgtataaaatattacgagcagcaggtagcgttggcagttttcattttttgaatcattaatgtttgctgtcatcctaaaacgtattatgcccttttgcacataatgacagggtagtacattggttaatataggcctatatcactatagctacttggagtgccccgtgtttcacagtttaatgaaggtgatatacagtaaggttactaagattgatagagacaattcacatgacatacaccccactaagactgtcattctttactgcccctctctccaccccctttcccctgtcttaactaatttttttaagaacccagtttcttttttcattaatataattaatgtggccaagtccactccttcttctctctctctctttaaaatttaccatcaatggcacaaaaacctccaaaaggttaatggagaattatacttaattataatgattcattatcatcagtgcagttaagctaatttattgtctgctccttaactaagagaaaagtctgttggggtgaaataacatacaataattagccttttgtgtttagtgactgctttatcctcttaaatcttattataaaattgaggctacagttgtgaaatagctgtcatagttgcaaagaggcagtagaatgtgtctgtgtaattgcaataaagcacacctgttacagaggtatagggaaacagtaaatatcagcatgtcagatgaggacagttacagggcttggactgttaagtctggcattgtccaaaggccaaatataaattaataacaggaacacttgctaccactaatgtgttttagattagcaggataatgccacattcagaagcacagattttattagcatgtcaacattggcaagaacacatgcacttttctcaaccataacataaaagcaaaatgagagagagagagagagcgcacgagcgaacaagtgagaggaaggaaaggaatatgtaaatgacaagatagcaccaatacaacaaattgacctggtcttttcaatggttttcaaaagttatttaaaaatacatatttatggaaggttaaagggttatgagcaagtcatgccaaagagggcagttaaagagagggacaggaagaagttgtccacaaatcagtatgctactttagcattccaaaacatggttggttcctaagtttcacaacaggaacttaagccatatgtagacagcctacattttcttgattatttttacttttgtgttgctatttttgttgttcatgttttttttttttttttttaaagactatgcccctataaaatcctagtgtatcttgcaccgttgaaaaagttctcccccatctctgaattggtgacattgaggaaaagttaagatagtgtgtttgggcttggaggatcagctgtgtgggcaagaatggagtctgggcagtgttacatccacaaccaaatatgagcattgtaccagaacgagatctcttcagcccagcctccagttacttatatgccttgtcaagtatactgatctgtaattttgggctaactcagataataaaaggaaagaccaataaaatgataaggaaagagttttgatggtgaggagggccctttctttgcattcccttgtccctgctgccagggatctcactggggtccaatggtcttagagaaggatggcaatgattttcagtctccccccatcctccccttaccaactgctgactccattacccagtacttacttctcagcgtgttgcttttgatcacgctgctgcatatgacctgtgtaatgtggcctgctaggaatccctgccagggataacaggggtgcttgagaaagaaaatctgcataaaacttatttcattcaaaatgtaaatgtcaaggagcatctttcattttatgcctaactgcagcctggatgtgaacaattccacagcatctctcctgaccttggaaggcagggccatgagggtgctgcgtcagtgtgtgcctcctgatttagacacccccacttacaggtggatgaagtccttactgttctggcaatgccagacccctgcaataggagttcctgcagtgttctttactgtctgcggactgacattagcggttaggtagccaattcaagtttaggagaccacctcattggtaaggggagtccacttgcctccaaaagccgcatggtaaaacagttaaaaagactgtctatttcatgtaaggggatgaaatgctttgacaatctaaaataatcttggtgataagcagcccagccatggtagagatattttaaacctctcaatatgtagaaattattttaaaactctaaacaaaaatagttattttgaattcacgtagagcacagtttagatatacataaataatgaacaaaatatagtgatggtatgctattgtgagttttcttttccaggtactaggtgattccaaccgtacacacacatacgtgtgcaaacacatacacacacacacacacatcttgcaagttacatacaaaagccgtatagaaaaaaaattatgatttttgtccttcatcttaaggaacttgcttttgcctttaaggatgaagtccagaaagtcatgaagagtcaaataagagtaaatgatttaaataacaattcaggagaaccacagatgagtcaaagggctttgcatcattagttgctaaatgaattatttggattataatgcttaaaaggagtgtaaatggagaaaatttttcctagtgtagttcctctgttctttttccatttagcaatagtttattgagtgtctattatgtgtgataaaatttccaaggtaaaatcaagtttgtattatggttaactataagacagtttaaaactttggaagcagtaactatcaaacaggtatcaaggattttgtacaaagaggtccaaaaatatctagttgatttctaactggaagaatcagagaaagcttcgtggagcttggtatttaccatgtgtttggaggtagcttttggatggaataaagcagggaaattatccttcaggagccaagtgagtaaagattttaggatgtttttcctggtgattaaagtgccagaaactagctttggtagtgtagttgaattaactaggcttaattcctatcacatgctattgcagtttaataaattcctgtggttaatggaagcttttttaaattttttttttctgcctcctgcagtgtgctgctctggttggtgaagaccagcctctttgcccagatcttcctgaacttgatctttctgaactagatgtgaacgacttggatacagacagctttctgggtggactcaagtggtgcagtgaccaatcagaaataatatccaatcagtacaacaatgagccttcaaacatatttgaggtaaggacatcctttggaaacattaatttttcattgagtttggcttgggcccgactaacatggtaatagacctgaatgcataatgagttcttactttgctatcatcaaaagacttttcatcacagttacatactttctaatttatggaaaaacagcatttggaaaacaaatgttttgtttttatttttttaaagatttaaaaaataaatcaactagggactaggaatcaacaactgtgagtgagttaaactgtgttgaaatactaaagggttgtgaaagattagtgacaaagaagaacaaaagtctaaacctgtttattcctgtctatttcccacagaaagaatgagcaataaatggtacctcatataaattaataaataagaaggcctttctttttaaccaagggggtagatgtctacctttgtttgctttactaattaggtgagctcttttgattattattattaattatatttttggttcatatctctaatttctttatataatgggaattgctaaacttgactaatctactgtatacttataaatcagtcaaaattcatttacttttcagtagcaagaattacctccgtgactccggactcttattataagcctaccctataataaagaatgttaatctattcctattaaagtgttactttgagaaaaggaattctttcccacaagatcagtactcatttacttgaaatacattattttttataggaacaaacatttagtgagtactctggcaagtgaattaaacgaaggatgacatatcggctagttttctttatcacaaccgccagtgccatcatcatcatcatctaatgttttctgagcacctactatgtgctggacttttcttattcatcagcaaagacatttcttatacttccatgttatttggttgaaatctgagtcttaagaaagccaagtttaaaatattaactgagttttgctggaacccagcatataatacatgctgaataaatgtttgttaaatcatgagagaatgatgaatatattaatgttgataacaataatagtaatgacaataatggccaacattttggtatactcatgcttaatatatgtcatctcacttatccttgaaaacaacctattgttaggtcctattgttatcattcctgttttacatatgcagacactgaaactcagagaggttatttgttttccccaaatcacacagttgacaataaagacctgggatttgaaccccaaatttatcggacttcaaagtttatatccttgataaaaatagagaacccatgaatttgggtgacagccatcctttacaaagacatatcaagctgcttctttgctcaatatatttaaaaatagaacagaatctttcctttcagtgttggttggcacggaggtagagttagctggtgagccgagacggctgtaggttctgcctatggctgagattttgtaatacctctggagattaagtgggttttagaagaatgcttaaggtagtagagtttggactggggagacagaacaaggtggagggaacactgaaggttgtggttagttctactttcccaggcttctcagccgggtcttagaaagttcatgtgaggacttggccagttagaactggtaaattgaacattcctcactcagtacacttgtcaagttacaggcccattctaagtcatgctgcattaaataaacaatgctttaaaaaatgtccatctccatagacctcttatctaaaaatcacctatttcatatcaggtgaatgccatgcattttgtagaggctagagaataacttagcggtaggggagatggcataggagtcaatgcctctctggtgggctactttaaaaaaaatacaactttctccataacttttatgtccctatattttgtgttgtggtatttgtgagaggtactttgcatttataccttcaggagacttggttcagcatctagttaattatctacatgtaggtgcttaatatatgccatgccaccctttttgtctccctgtatcatattctatgctaataaaattattttcagcactctaaaacagaagttcatttaatttagtctctcattaggtcattttaaaccaatgattctcaaccaaaggcgattttggtccccgccccacaccccaattcacgggacatttgacaatatctggaggcatgtttggttgttatccctggggacaaggggatgctacgagcatttattgagtagagactagagacaaggaatgctgctaaacatccaacagcctacaggacagctcccaccacaaaaaatgattcagcctccaatgaaaaaagcactgaggttgaaaaaccctgcttttaaataaagtcacaggcttcccctttataaattactaatgattaattggtcagatttctgagagaagacatagtaagctactggatataaagaatgagaagtcgtataacgatatcgggatgcctggggctccaggactaatatgtcaggtatcctcttagtgtcagagggcaaaagtgactgtttaggtaagttcccataacagttttctctgatgtcacaaagcccattctttatcgaggcaaagggtaaagtcatatgtggcaatgcccttaccaacagcagcagcttcaggagtatttgcatggcatgaggacacctccactctttgccctctagtgttaaactcaggcatcttttctgtaatgtgaaaggaaagcgtgttttcagcacaggtgacattctaaaattgggtcttccctgtgaagaaggttcgtatgaaaccagataactctttcatggccacaggtttgtgttgcttctaccaaagcagcatttcagggaagtgccttcccagggccggccactcacagtggacttttcacctgcactcaccttcttccaatttgcaaagccctgcctcatcacatttgagaaggccttgtacttgagtaagttaaacagtcacgggctctgctgtctctgatctgacaataacaagcattatctactttggattcccagaataaaatcaggcactgagtagttaaatgcttttccctgactcaagtagcacgtcaatgacaccactggaaactggccatcgactgaattctcatcaaagcagaaagtgggatttagggatatataatagagtggcagagtcttaaaatgttgagagtaaattatgtatctcttctttttgtttcttccatatgtttgaatctaagtttaatttttatttaacatcacaaacttaataatgataaaaaatgaagctgaatgtcacaatttgagaaagggaattctgggtggtggcagaggggtagcaacatgcaatagcacatgttggttgagtaactggacacgcaaacaatgttctctgcttacgcaacctgtgtttggatgtgtaaatgcaggtgaccaggtacgattcagaagccactttaaaaaacaaagcaaaaggctcagaggtaacagcctccagtgaatctgatccatgtgtaaggaaaacaggatgcgtccctggaccggctggtagcaagatttatgtttcagaatattgcaacataacttccttccctctgttgcctttgtgcattgtttgaaggaggagaataaaggactacttttgcagcacagcagtctgtaaagatggatggcatggggttagtttaaatagcatattggcctttctgggtcactgtgggcaaccttgtccctggtttattttaacacctgctttaatgcctccatgatacaactgaatgggcatctttcattcattcgtctgttacttctgaatgaagctacttggggttcgttagaatgatggcaagtgagaatgcagtcgtctctaggtcattacttgtaatacgttctgaggactgcctttgctgatggggggagaaggactctcacagctgtagccagcgttcatgtttggtcattgctggaactctcaggaagcctgaaactgtgaactttgtagcagaaaagggtgagtggtggttttgtatttgtgtgtaaattatcctgctatatgcaatcaaggaaatgaatgtggacgctttcaaggctacttggttattctagtgggaatatagatactttacttttcttcatttggctttcagttatattctaaattttgcaaaaatggacatatattatgtacctatcaaaaagttaaaaataacaaatattggcagttcaacagaccatgagcatttgaggagtagggaatctgcctgtcttgttcactgacatttttctagatattttctcagaaaatagcagaaagtaagaactcaacaaatacttgttgcataatgagtgagttgatcttcatgtgtttattgatagaatgaactgcgttaggtaatgtgaagattatatacaaagcacaaaagaaggcctgtgtcctaaaggactttaaatctagtttgggaggcaaaatgaacaaatgtaaaacaattaggaaaccatgcaaggctgtgtatacaaatatacaagtatatgcatatgtttttagttcttagcaattcgaaaacaatacaagactgtatattcatgtatatgtatatatgtgtatgtacctacataggattatatatatatttgcaatttgcaaacattgcgagctcgtgtatgcatatatgcatgcatatatatgtgtgtgtatgtatgtgtatttctagctgaggagataaacagcaagaataaattcacaaagccttgtaagagaagagcagagcgttttcatagacgggatgtggaggtgagcttggtttactcaaagtaaaatacatattaatgggaacgtggcagtagtgggagtaagtttggatgtaaggtaggtacaaaattacggtgggtcatgagaacccagttggaaatgtttagagtctgtttagaaagtaggatgtcattgaagattttttagcagatcaacataatggaggtggtatttaagagtgataatgctgacagtcgtaagaggtgtaggcaagtaggaaatacggaaaatcagacagcaggcagtgctgcattccaaacccaatgtgatacaggtacagggaagggacaaggtgatagcagagggggtggcattcagggaacagattcaaagtaccttgaaggaaaattccatcagccctgataactctgagttcggatagagagagaggtggtaaggaatgctaactcaaagatattccaaagagaagcagaacctcgtggatatcgttcctggttaagtttctgctcacctttaggagctgaagtactttcctagactcgtgagtcattttacaaaggggccctctatctttccactgcctcagggacagaacatatttaacccaatccacaaatttacgtggtgtctgctttttttcacttgtctccttggaggaaatcctgcagccttccatggtaatgaattcctgcttctgactgtgcctgtggtcagacagacttttctatgaatggcaaacctcctggaattttaacaaaacaaatagacaagaaaaaaagaatgcatgtatatacaacctcaccttaatttaatcattggaagaataaattcttttttgttatgtgggaggactgaattaatttacaataatcacttttataagatttctgggatttccaatttgcaatcaataaatgtttgtcatttaaattaaatttacggcccacagccagatttttgccacacttggtaatgacacttacagagaacatagacttcaagtaagaaaataatagccatttaagtggagagataattggctgtaacataagaacattgaagaatgttgaaactcatggagacttatggagtattttaaaaatttatgttgtacttatctttgcatttgtagtctaccacaaaattccaaattctgggtataaatcagttagatgttcatcttggagagtcataaatcaggaagcaacaatctgacccagcctgtgtgctgctttattttcagcctctcctgtcggcttatcttgcagggagactaaatagtgttgttcgtttgtgtgtgtgtgtgttcatctacacacctcatttaagcactgtggttttagacttctcggcttgataacatctggcttatcttgggaacatctggtttatcaccctatttcttccctgccattatgctgaccactggaaaaatatggctcaggagttctgacccacagggctctgtctcttggtatcaacccctgctaataaatagcaactcacaggatgcaggttacgtgaccatctttcactggcactaactttcctgctggtggcttttgttaatggaaggtgtggctaggagagatgaaattggctgctttttttttttttttttatggacgttgattcggttcttagccatttgcagtttgcaaagtgagaatgtgtatgtttcattaggcacaaggatttcagaaagtgctattttgtattttgggataggagaaaccaatgatttcatgtcagatactctaggcactccagaaagtaaactgggacattttatgggcttattgtaggtttttccaacctcccggagtctcaactggctcatcaaagttactctgcctggatatctttggggccaaaatagtggagacccaaattcacaaggaggaaatcttggagcagaatcaggaaaaagtggctcattgcttcttagatttacttcaaagataatagtgtaggtgaaagtaatcacaaggttcagggtgctgcattggacaaactgtctatttgtatagcaaccatgtgtctgtgtggagaccttatacacttgctgtgtttatttgtccatgccccactatctctacgccaggtcctggaagcacagcccagcagatgactcacctctggatggaatcaacacacaaagcagataaaaagctgaacattaaagaccacattgttaaagcagagagccaaattgttcctccaccattccctatcccagacttcacatctaacaaggttaatttgtccctataattatgtgcctattctttgagtaatgaaaaattttattgtgggttttataaaatgaattgcctgtgatgtaaaacaatttcagtaagggccatttttttttcttcttcttaacctctcaggttccttttaactttttttttttttttttttttttttttgagatggagtctcgctctgtcgcccaggctggagtgcaatggcaagatctcagctcactgcaacctccccctcctgggttcacgccattctcctgcctcagcctccctagtagctgggactacaggcgactgctacaacgcccaactaattttttttttttttttttttttttttttgtatttttagtagagacggggtttccccgtgttagccaggatggtctcaatctcctgacctcgtgattcgcctgcctcggcctcccaaaatgctgggattacaggcgtgagccactgcacccggcctccttttaacttttaagactgtgcgctcagaggtacgtttgaaagcaaggcagcatcctatgctttactgtagctagaatgagagcagggaaaaggggagagagatccacaatgaaatacacactcttattcttggcaatggcagagttgtttgaagctaaatgacttcttatccattaagccatttgtcccaaagtgatgatagaagatacttttgtgccttttcttttccaaaatgatggagtgatttgcacagtttcagattctaaacactaatattttgtagacctgcccatctccattactactgcaagttattcattcaaggtttgcagccagatggattaatgaattaccagatcttgcataaaatgacttggcctgacttaaacaactacttttttttttctttctccttttctttttttgggggttagggtggggagcagtcttacaatgggtgttaatgggctgtagagggagtgagcccccattgagtttttttaaactagcttttttaaagcttcactgcactttttcattcttttctgaacttctgctcagaaaccgtcagttcaaggaggagcaatcaggctggtagggcagagaggaggaaggagactcagtagtcaaatccctggtggccgatgcccttccctgcgccaaatcagcatgatttatcagagccctctcttcagcacagagttgagagtgagttccagggtcctcctcacacaatatgcatagctggagctctgaactttgaaggaaagcctcagagctatttgcaaaatgctggtgcttagtgaatactaaattacatttaggaaatagtctactgctaccagttatacttcatttttattcttgacacagacacctaaatcagagaacagtaacatttcagagattatggaagcagtttgggtatgctccagcactataataggatcagaattttaaggccttttgtattattaccaatagtcacttagtttctactgcagtgtactttgtagggaattacagcttttactaaaaagattaaaatgctattatgcaaatgattgcagtatgttattatgtttacaaattaacatccatggctcaacacacaaattaactaactatgctatctgtgttattaaggatttaataaagtaactgttaataaaaatgggtagcttggaactttagtagaaagcaattgtgatttaacacgtggaacttgagcattgtgtttaatgttctaggtgatataatggtaaaataaagttgaaaaaagcacatagaaaaaccaaaactgtgtgaacagcagagctgcttgcctgagaggctgatgaacgtgaactaaatagcttcaagctacaatgtacagtgggcagcatagcaataaatctaagcaaagcacacaaaacatcttctattaataaatagttcattgaaatgataattaccctccattacgtgtttgatatgttccatacacacagagaatacttatattattctaaaatggatctcagagcaaattttgctgtggcgaatgggatttagctgaagaatatcgctgggtgataaaagagaagaaggctgggttcagactaagatggctttacaaacaggctgcaaattgctattccgggctgttcataagagatcataaaagcaaggagataagagccgccaaggtccctgagaaatgaatgtatgtgattatgttatctcgtaggttggatttactagacagaccgacaacaccttcactttagcccaacaggaaaagtagaaagagatacaggtttggataacaaactttgttagaataggaaattccaaaacactgtaattcaaatgtttcagaagagagccaggattccagtcactgacttctgtgctggatctcaaaaaaagagctagggatatgacctaatattaagcaaataaacaaaaaagaaacaaaagaattacaagaacatcctggagaactaattctatatttcaaatattttggactgatgtttcttaattctcaaataaagatgttgaggacttctaagtccacaaacaattatctttttaggtctccctattgagggatactaacttgaacttcttagtaggaatatctggatgtgcttaagaaatgtacaagcagggaagacaccgcaaagttggtcaaggtttgtacccttgcatacaatacaagcaatttattttgttccaaatagcacctctgtggttgcaaaactacttatgcaaatttttgatatctagctttagcaaggtgcctggttccttcatttcatcccacatttggataaattgtgttgttcttcactcttccaaatttgtccttgtggaagcgaacacttgtaaattggttgaagcttgctaagagaaagaaagggaggaggtagggaagaggaggaaaaaacttgaccaaaagcagttgctgtgacagcttatgatttgatggtttgtggtcttgtcctgttctcaagcacctgatcaagaaagtggtacaatcctgctatgcagacattctggaaatcttgccaacattcacctgacatgaccaaggtttaaagtccttgctgtaattttacaaagcgtagtgagagtgtgtgcctgtgtatgtgcatatacactctctcatatcctttttttttttttagggggaaaaaagtgatctttgccatagaagggtggtaaaataattagtccaatagacaaatgtcttggcccatgtttaaacagagctttaaggacacagtgttcccaagagtcacatatctaaatacaaaccagtgtcagctgccatgcagaccaaaatgtaatagcctgctttcacataggtcatcgtcaatccattttggtcgcagtcacactgcacatctgtttctgcgagctgcagcttcttaaggtggcatttggacttcatcagaacacaaacaaccaagctataaattgccacttctggagttactttgaataagtgtatactgtttcatatttataatggtgaagcttcataatattcacagtgaatatgtaacaccgatcagttcaacaagcatgaaattgtatgttgtcaacctgtcacataaatagagtcatattctggcttgcgataatgttgaactaacattttttcccccagaattgttgagaggttcacagaaaagtgaggaggtagcatttcctttgggtagataaccagtcaaggctattgtaaagttgatattactgttgatgggttccttttctcccctccctccaaagcactagcttttctcgggtgaatgctaattggctaatctggtgtgtttctgctgtcatctaacggtatcattttcagctagtacttggaggctctttttgggttgtgtatgtgtgagtagctttttttcccctttaaaacttctttttttttctttctattcttgtagtgcaaatcagtgctaattgtcatgaaattctctaactatactctggcaagctttcttgttgccttttcaccccagttaactcttaatgtattactagagcattaggaaataatgaaagctggacattttattcaaacttagttgagatagagaatcatctaaagagatgcagaaaaaaattattgaaccaaatttgcaccttactaaaaagataaaggatgaatgaaatgtgcttgccggtagctacggagaaactcagagaccagtttccacagtggctgatatttctgcaccagaggcatggtagaaactgatgcaagtctgttttcacttttgagaaattcttagatgtgttcaaccttcctcatctttcttccaatggcctgaagacaaaaaggcattgcaatctgtattacccgcttaagctgctaacttcaacaccttgagatagtacttcagtttctctaaagcactatgcaatattacaggggattattaccaacacttttcttttcatcccatatcacttgggatatggctggtcacatttttttctttattttttattttttattttttatttttgagacggagtctcgctctgtcgccccggctggagtgcagaggcacaatcttggctcactgcaagctctgcctcctgggttcatgccattcttctgcctcagcctcctgagtgagtagctgggactacaggtgcctgccaccatgactggctaattttttttttgtatttttagtagagacggggtttcaccgtgttagccaggatggtctctatctcctgacctcgtgatccgcccacctcggcctcccgaagtgcgggattacaggtgtgagccactgcacccggcccacattttcttagacaagaaccaattcactggctaaagctctcagtttccaacttttgcaacatcgtcacatttcttcttgcctgtggattttaaaagttcatctctcacttatttacttacccattcatcaaaatataattgtcatccattagcatgcttagtgtctggccattttagggggatacagtggttaaaagtaaacctagtctctggctccatgaaaattttggttagtgatgaagacaggccttttacaaataagataagctgtctgtttgaggaagtagagcagggaatttctccatctgtctgttacccagttatcactagcagataaattctgcccttctcctacttattgtctttagaaatgccttcaccttgaaatggaattctgctggagagcatttctcctagctagaggaatattctattccaaaccaagatctgtcccactgccccaacaaatgcagggcagtgggacagaatatttgaggttggaagacctgaaatttatgatgtcctacacacagtatattaaaataacagtttgctcattggaagtgctgggtggccagggagtgtggagggaaaacaagaggaagccaaccaagggaagagagcaagaccgtcagtggagagttctttaaccagtgtgcaagtctgacctgaccagagtgctgtgcccttggtggggcttctatggatgagaactgtttggtaccattttaggtctgttgacctttctatttgagaatggtatttcagtccagctggaaggactgacacgctttttgcctgtttgagacacttggtgtatgtggcttttctctctctctcttggatccatcatctctaagtgatagctccttgcttcatggggtaatgctattcaggggctatcctgcacccttgggagaggcatgtgcaggaagaatgctaccgatccctttcctcttccctctggaggtaccaggcattacatccctaccaagccttactcaattaggtctctttcagattcctataatactcgagcttaaatcctcttctccacagttctttctgagaaatttatttctgctttgaaacggctcttgtataggggaaaagtgcctctattatagcactgcccttggtttttccatgggctcttggcttaaggacattagcttccctgggtgccatctcatttgctcagatgtgaagttagagcttctgtattccagacatagttctcctgggtgtccagggatccttgccaacccagattctctccagatatgttcccatgtcagaatcctcttgtgtcttgccagcccatacttagcggggacaccctgctctctcctctgagctgcatatctcagcatgcatttttcatttaggcaatgctgtctgataggcaggttcacctcctattcccactggagaagagtctgggcaaatgcctgaaagtttgaacacagcaatgccatataggataagtgacttcttttccttgctggtccccaattccagggctctgcgtgcaacagatttgagagttacattaggtcacaatgccactgtctagctcctttaatcctatcaccggcaatcccagcaatgtagctgaggtggctgcccctgtcctgaaggactttgtgtcagtttctcctgggacaaatctagtctggaccactttgcaacatttgttcaaactgaaaattttgacaaagacattctgttcacaaagagccaacaaatgttctgtgtttcgatacatttggaggttacaaaatgttgcctggtcttggcagataactaagtctggggacccacatagtgcaagccatgccctgtttaatttgtctttcaatggcaaatgtgtttcttctgtgattcagcataagggatgataccctccaataggactgtgtgacctccctgctgcttttgtggtatagaaaagaaaaaaaaaaaaaaacacggataccacttttttcctttagttgctggtttatttttatttccagctacatcttttatagttgaaagagaagatgtatgttccatagatagtacgcatttttatggttatttttataattcatactggaaaacctaatttctgtagccattaaaaatttaggattattaattgtctgaaacataggtgagaagtacactgtttttaaaatgtctctgagaagccaaactagattcagaaaaattccctcagatggagcacattttattcccagatacacttcttcacccctcacttaacgcttgcttccttttgctttacttatgatttaaatgaatccggttgtctaatgttctattcaatatgtgatgttctatgagcacatatgacatttgaagaaatggtttagaaaattcatgaaatggtgacagtaaaaagataatggtgagcagtgacaactgaccaaaagagacaagactacaaactacagaaagttgacaaaccctgaaaatatgacagtctggggccttttagtttgagggaaaataatcctatatttctcaataggtccatacagtcattttgcaataccagacagtgctaccaaaatcaatcctcataatttttaaagtggggaaaatatgtaaatacgtgattcggaaatctttccataaaaaagttttaataaaaagtttggtgcttaagcaagttaagttctttgatttatctgcaccagtgcctatgtggattaaagcctgatcatgtgaggaaataggtgaggcatatatacaaacacaaacacgtagttttagatctaacagattttaatggagtttatatattatcctgtaagtgtttcctgtgtagactttgataataaagaagaaaatgctccatgaaataccgaacttcattttataatctgttagattacatcttcccttaaaaatacagctattgaaattttcttgaataaagagaccactggattctttttccttatcaatagtaaagctttttggctacagggacgttggtcaagacaaatatagctcagtagagttatcgttaagtaagcaatttcccacattactttagaatgaaatcgcctatacttttctccttcatggctttccgtatttatcctacccagtcctcaaataagccaccaccccagcaatgcacaactcacttgtaaatattcatctggagcatacgaaatcgtaatatcactacagagactaactgcccccccgcccaccccgccgtgccattttcctttggagactcttataaataaatgaacaaccttagagctttcaaaacagtcattaagatctgctacttgcctttggataaagaatttcagataatgtacaggactgggcttcctaaatctaatttctgtctaaaaacctagggaatgctgtagctgtatcttctctatccaaactctcttgactgattctggcacctttcacctgagaatgcacagctcaagattctctatacggacccagagccttggtcgggccacaacccttcattaatattcaaactttggcagtttcaaagaatgctgccctcctcgaccactgtgagcagtccagctcccctgctactttctctcatgcttatcctttgtacgaagacatctgtgtctttcctcatgtctctttcaggagtaattcttccccttgttcaattttttcctttctctttatggctgtcgtaatagcccctgatacagccaggcagccatgaccctgtccatcactcacctgcaagctattcttgaaccactggatggtccctgagtgactagattaatggtgccagtggtgagccttttcacctgacctttcatccagtgacatacaagctgattccaggctgtgtgcaaggctggctgccctgccatctctgcaccctccatgaaaccaagcagtggaaaggagagtatccatgcaaattaagtgcagaagcagggataaaataaggtgtgcagttgggagttatcagaaattaaatctgtcttcctttgagtgccattggaaatgagtcttaaggaatgagaactgaaaggaaactttccatagacaccatttccataaacggtattgtcacaatatgctattttaaagactggttgttttggtctgtgtttacattaagcctttaccaggcatgggataaactattaagtcccgaaatttaggaaagtatttgtggccgtctttggcacaaagtgaatttttgttgtcacatgtgcaaaagagcatctttttctttcgttaaggccttcgaattgtggttcagctttctaagtaatagctttttggctaaatctctcaaggtgcattataaactgcatgagggaaagagggacctcatcacctcctcagtccctagcacaaagctgtgcacattaaaactctctctagtttttgttaatggacagatttacaggggctctaccaaattcagaaagagagagagaatataacatgaccttcccagccattcagaccaatcatgctaaaaataagacatatccaagatctgagaacatgttctccaagagatggtttataaacagagccaatagtgacagcagtatgctgtgtgtctgccagagtgtctgtgaacttaccccctaactcagctacaagacttgctgttcagatgaagatatatggagttgggagacatgtggttgtgttaagcgaatgtgcattggcgggtaaaggcgctgctatatgtctactgaagacatagagcatttactcttctctccccgagaagaggaaagggctctgccactcaatgaagagctcaggaacaggtaccttaccggggttccagagcatgaaagtaagtgtgtctctgttcaaggaacccgctgttcccaggaagctcatgcaaatgcatggccacagcttcccaacacgctgttcccagcactgtgcccgtatttcctggctggttttgaccctctcaatggattcagacttaaaatttttgcaactgtttttgtcgttgttgttgttgtagtttcctcgtttacgattgtaatgaaaacagtttacctcttgtggaaaagtgtgcatgattgtacaagtttactgtgccatacttgtatcgcagttgccttatttttggaagaatcaagcttaggggctagaaagaaatcctgggctggggaatgatgggtaatttctcaaggcattcagatctttcagaagttgtgaatgattctgaccttactttcatttatagtctgtgatcattggaaccaggatgcaaaaatagcagagagaggatctccttcaccttaattccctgcccttttctggtatctgtagtacaattgactatatggacatcactgctattttagcaaaagctggtgagttatcttttttagacgggacagtctacccagtccaggattttagtctgactgtcatgttataattcagtatgttcctatgcaggatgctctaatgcagagactgatttcattcattcttaaactgacccatttatcaactattttaaaaagcaacaactacatgctaggcactaatttaagtgcgcataatacaaagatgtattaagtacataatgcctacgacacagaattttcccttcaggagttggttggctagtgagaaagacagacttcggcaactaattataaaataaggggatgcattctgtattaaagtcagaaatgaagtaccatgaagacacacatagaggagtaaaaatgtccgtgaaaagggtgagaagagaggaaatttgataattgttgctagatttttttactcgtgagtcttcaataagtcagaagttaaataccctcttatttatttataaaatttagcaaactgcacttcccacctcttaggaggaagacaagaaaaaggatacacatagtaggttcttaataacatttgaaaataaatttgccttctaacaagtcccgtctacattgcactccgcagttcaatggctcattaggttttaacaaaagcagcgcagcaaaataagaaggattcttgagtcaagcacccccgggcggtatctctgagagcaaatgtgacaaatagaatcagaaatgaattaaatagtcagctacagcaagccaagctaaaaaaaaaagctctgaaatgacccaaaatggaaacgtattacagttatctgcattcacagtaccgaacaagtttggtcgtatttaagataattctctagtgcctgctatttttagctcaagggtaagctcctgtaagagtctttcggcattgcatccctttaacctggcctaacaaactaagccaataagctgtctgattttcctggtccatcagggaggaagagagatagctaaaacaaaccatttgcggggaaaatgttcggcctatcttgtgttaagagcttttttcatatagatttttaaaacatcccaatattaagtgttgcctgtcagagaccaaaatgtcaagctttgctgttttgaaattggaggctcatggttataaaaagaggattttataggcctagtctaatggaaataaacattactccattaccttcagtaaaaccaaatctttacagttcaagctatcattattaatgtctatgagaagaaagaaatgtttctagggctttatttattttttttaggtaaagaaaggcgagctgtaccatagcaaatgaaagttttcttaaagctttctcctcagtgactttgcagtgtgtaatttaaaagcagaaagcaaagaaaatgcagttttaaaacactaggctggctattcctggtatctttctttcttacatattcacaactctttgtgagcctattgctctgtcaattcttgtctgtctgtctctatatagtgtatacaaacaacttcatcaactattattcaccaccttctaagtgcacatgtacatgtgtgcgtgtgtgtgtgtgtgtgtaggaataaatgtgggctgtctcagtttaagccatataactgcatgtgtagattacaacacttaacaatatactagtttccactcatttcatcagaaaccatgctgctgatcatcaaagtttaagactgttctcaggttgaccagtttacctacattctgaagcctgcatttgccaatttagtgtgaaatagatttcagccgcagatgctacctgtgaggcaattaatcgccagatatttcttgagttcatattattatgtgcaaggtgttatgccaggtgcggtaagaggtggaaaggtgtctaacacaaggcctcagtcctcaaggagacttgtcactgaactgcagaaatgagatacccatgttgatagaatgccacccaaggaaattttaagacatttatagagtccctactgtgtcccagacaccatgcatgggtcttctctcttaatagatctgattctacctgaattaccagccttctcataaacattttattggggccgtgctaagtgtcaatcactacccttggttatgtgtgatttctgtcttcccacagatgaggaacttaggacttagtatttaaccagaactcagatttcctggttcttactgcttctcctcagtgtcagagaagaaatgggtattttctatcaggaatcctcagaaacgctggccagtcacattgccatgttcaaggatatatttgcttgactgaggtggtccattgatggttgaaggatcaagctgtgactctttcttttcttttggaggcagtctcactctgttgcccacactggagtgcagtggtatgatcttggttcactacaacctccacctcccaggttcaagtgattctcctgcctcagcctcccgagtagctgggattacaggcgagcactaccatgcccagcaaattttttgtgtttttagtggagatggggtctcaccatgttgcccaggctggtctcaaactcctgagctcaggcaattcacccaccttggcctcccaaagtgctagggttacaggcgtgagcaaccgtgcctggccagtggtgcctcttttttgcagagaactgctggttgcaattgcaactgccgtctgctgtcaatgaggtctttggtgctttgcaagcttgctgctgatctttagtcccctttaagacgggctgttaatctttagcacaaggctgactctgcaatacagcacacaccaggttgcctaacttcttgtttatgtgctcccagggatcagaaaccagtttgctgtttccccctaaaaccacaagccttggggtcattgtctctatctgtcctttgttctccatgtacagtctgctgcgaaagactttcctcttgttcttgagtgcatgttcaccatcttcctccatcatttcctttgaaccctcagtaactcatacttaggtgatttagccttcctctcccctgccagggctggttgctgctactcctgaaggtatactaccccacacataccatacttgattgttaaaccaaacattatttttcagcatctgctgtgtacctagaattttgccggaaaccatgataattacagaccaagtatatgggcttgggattcccttcctttggggatgcccagctgtataaggaggcaagacttacccgggtgacacaatcagacaatgggtaaaatgtagatagtaaaatgtggacaaagccctgttctaggcaccatataaataaaagagacaatgaattagcccctgccttcagtgtccttaaaaactaaggaaacatgtgagcattggcctgatattaacaaactactctaagaattttagaggtgggaagagatctgtgaaacctatgagtgaagagggaagctaatgtggtggaggttgcctttgaaatagatcttcaaggctgggtccagtgactcacacctgtaatcccagcactttgggaggctgaggcaggtggatcacctgaggtcaagagttcgagaccagtctggccaacctagagaaaccctgtctgcactaaaaatacaaaaattagccaggcgtgatggcacgcgcccataatcccagctactgggaaagctgaggcaggagaatcacttgaacctgggaggcagaggttgcagtgagctgagattgcgccactgcactccagcctgggtgacagagctaaactctgtctcaaaaaacaacaacaaaaaagatacagatcttcaaggtgtagagagatttccatggacggagaggaaacgtgggcattttagacgtcggctttcatctcattattattttaacacatatttatcacctactatgtgcacggatttatgctagatgttggaataaaaaactgaacaggatagagacaatgctatgagcaacacagtagtggtgaggaaagaccaagtgatgactggggactcatctaatagagcagcagagaaagtagatacaagtgaatgggatcttggaattgtactaaattaacatgaggggagatttcatctagcatgctcatttcacaatggagaaactgaggcccaggcatgtgaagtgacttgcataaagaatatcaaggttaagtcaggaggagcagaaaaaaagacaatatggggtttgttagacaccagggactcttaaaagttatctggtggcatcagcgaagaaaggttatcttagagcttgcaaccaggggcctggtgaggaagctgttgaggttttcaggcttgaggtcatagagcttgaattagggggtgatggtgacaatgaaaggaaggaatgcatatggcagacttcccgaaggaaggatcaataaagattgttgtcatattaagtgataggttggatgttgtggtgaaaaaagggaggaaaaatggctgtggtttcaaccttgggtgatttggagaatttgggcttggttaacaaaaatgagagaatgagaagaggacatgtttcagggaaggcgcagagaggaatgtgatgcgcagattgtaaagcaggtggggcggctgctattggaaggaagtccatgaacaatatgcgacgatggagctctggagaagtcatggagtgcttgataaggaggggtgtcttcaagaacattgtttatttggcaaataaactggaggaaagatttaagggatccccttttgccccacatagtaaagatttttctcttgctttgagtttgataattcgccaggcttcttcttgccaataataataatactacagtagctttgggcttgcccagcactggactcaacatcttaagacaatgttaaaaacatagttttacagagtttaattaaaaaaataaaaactagtcttatctaattctcataatcaccatgatgggttgaaagtgttacctcattttacagtttggaaagtgaggcttaaataagtaacttgcccagggccaagttacagaaagtaaccagaagaactaatattacctaactccaacagtcaaattcgtaatcattcccttacactgcttcccaattaatacctctattgccaggcactacgcttctcatcccctcctactcccagcttctttcaaattttccaaatgcctggaattatttctgtcttcttgtttgcaattttctcaaattttaaaatcacaggaacctctcaaattcaggaagtgttccctgattaattccacctctacctaaacatctagcagagacttgacctgactttgtccaagtagattttgtattatttagtggagagatcagcatgaatctgttcagccacagactggtcaacagatcagttcatgccctactgaccacagagctgtagacacttccatttgcagaggcttgtacttaaaagcatatattagaattgtgaaactgggcactgtttgtgacattcttcatcctcactgtgtatgtggttgatactcgttgactgattgactaagatttttgctggcatttggttgagaaggaaggcaattaccaagtattgataatgcatcttaaacctagctttaaagtcttttattgaactcttgggcatgtcttcatactaaattcagtagaatatgcctgttagataagtctcctgagagacaactttagtgaggaatataactctttttaaaatgcaatggaatatatgtatatttccccaaataaacaatttcttacaaattgcacgtagctgtgatcattccccttcctttagtgggcagcaaatcatgttgcatttgtgttatgcattttttcagaaatattttgccttttttttgtttctggaccaaggagtcaaaccatgccccattcatctttttcttatatacaattccttgcacataataggagctcagtaaatatgtaacactgcatggtattctctcacctacattataagcagggataatggcttttatttcttttggttcctgtgttctcctagcaactccctggtttctagttcaacattatgtccataaaaggtactcagtagctggtgaatgaaggaatgaatgaatgacatttaacttgtgatcatctaaaccattactaaaccaaattggaaatatttttaggggactgggaaaattacctgggtaacatgagctgttgagcagcttctgggctgggtctggtgactgtatcaaaatcttcagatacgtcagtaattccacttcagcatgttcattctttgtttcgaataatacaggtttttgtgcattgatgtttaagataaagtggtgcctattttgcatttctagttatgtttacaaaacagtgttttattgctgtctaaacatgagagtgctctcaaccactcccactgcagcacattgagaaagggctgttaggagtctttgcccttagtttgaaatatgttgtacttagaggtcgtagtgttctggtttgggtagcaaattattgatcagggtattatggtaacagctgtactgctgattggatgaagataaatatccaagcatgcaactggtattacctgacattattgtttttcctgggagcctagtcatcccaagggggttttataagaatggtcagaaggtaaatattaccaagagtctagtaggcagagtgcaagccagtggtacccaattctctccattcaccactatttgaattctggcccttgtgttttcctgcattcatcttttgactctttatttagatttccttgactttttagaatttttcttttgttccttgcttctttggcttcttgctgaggtatttattttttgaaggattatcaggaaacaatagcattgcttgtaatctctctgccattgagtttagtggtgcttcctctgctgttatcagagacttattttaaatagcattatttgttactgtatatatttaagatatagaacattatgttttgatttacaaacacatagtgatgattaccgtagccaagcaaatgaacacatccatcacctcacatagttacttttttttgtagtaagagcacctaaaatctactctcagaatccagtacaatattactaaccatagtcctcatgtggtacattagatctctagacatatccatcccacataattgcaatttgtacactttgacctttatctttccataccttcccctccccccacccctggtaaccatcattctactcgtttattttttgtttttaaggtagggtgtctcttgctctgttgcctgggctgggtgcagtgatgtgatcattgcttactgcagcctcaaactcctgggctcaagcagtcctcccatctcagccttccatatagctaggactacaggtgcgtgccaccacacttggctaatttttaaattttttgtaaagacaaggtcttactatgttggccaggctgctgttgaactcctggcctcaatcaatcctcccatgtagagttcccaaagcactgagattgtagggttgagctactatgccccaccttctactcaaagatttcttaattgtctaactcaaaagccctttttcaggtccccattcttcttgaattttctgtgctacttgaatattccttattgaccaggctacatgaaaattctttctcttttttggtgttattttattttattttattttattttattttattttattttattttattttattttattttattttattttattttgagacggtgtcttgcactctctcccaggctggagtgcagtggtgccatctcggctcactgcaagctccacctcccaggttcctgccattgtcttgcctcagcctcccgagtagctgggattacaggcgcccgccaccacgctgggctaattttttgtatttttactagaaacgaggtttcactgtgttagccaggatggtctcgatctcctgaccttgtgatccacccacctcgacctcccaaagtactgggattacaggcgtgagccaccgtggtgttacattttaaatattttgaatttttgttaatgttcttctttgcagtctcccaatttccttccctcttctttgaatacatcttctctccttcctttgctggaagaccctaaatgtacctgtaccttccccttacactttcagcattcaggccaactagagataattggacaagccaaagatcatgtctgacatggctcgctagtggctctgtgtctgaatgggttggcatcatctttaagaatcttgtcttggcctaacttgggactgacattttaagcattaaaactcttcactaattaacagaggcaacctaaagaatagtttttgaaatgatgcttgagtgttctcttactacattccctgggaatattccctggaaagcccacagagttgataatgtatttgaatcatgtactggaatgggctagtattaaaagttattacaatactattttaatttatatttataaacttatttatttgtattatataaatttatatttacatactttaatttatgtttatatttaatttattctacaaaatataaatataaatttacactttaaatctatataatttatatttatataagtatatatttatataccttaatttgtatttatatttcaactcagccagtccataaaacttgtagttatttttcctgtctttctaaaaaggctaaaaggcaaatgttctgcagtatggaactgagtctccgagttaagaggtttgccaggtaattgctagcaatgacaaaggtgagatttgactgtcaattttctacctttctgaacattagacagacttccaatattcacatatcatctctatgtggcattttccaggactttcttaggtcttcaaaaaccaaatgagggacatatctctacttcacaatgaggaaaccaggacttaaaggggcttgcccaaattccctgaggtcagcaaccttctcttctctttgtatcccaagaacctaaaggcaatggtagcaagatggttaggagactgggccctgtagtcagacatgcctgcctttcaaatcttagctctaccactgacttgcagtaggaccatgattatcttttttctccttttgtaaaatagtgcctgcctcagggttatttattcattcagcaaacatttactgatcacctatcatgtgtgaaaatgttctaggaatatagtagtgaaccagggagtaaaaaaaatcctgccctcctggagcttatgttctagttggttgttgttaaaattaaatgagacaatgcattgaaaatgtcctgtatagtgcctggaatagagggggtatgcattttgacagaattaagacaaagtctacaaactcctggaagtaatagcttttgcctttccttgaatctataaagatagcaaatgtaatattaataagtcctttacttttccaagaaccatttcattccacggaaagccatagtagtatttagccatagtagttgtttttataatttagccatagtagttgtttttataatttagagttctttggttgcaaacaatggaatagaaaacaaagaatcaactctagcttcctcaagcagaaaggcagaaggatatgtatggctgatggaattgatgagagggtgttgaactaggcttagtacctaaaagacctggagcctgggaactaaactgcaagaggagtctcatcacgattcaaatgtcaataggttttccctattctgtgctagccctggagtggtgagaatagtgtgaggcttttgcttactggctctcggtgtgtatccagtcaaggagggataattctgtgaaaggaaagtgtggtgcatttacaaatctactgggcagtcaagaaacaaccagtgacagttctgaggtcttaaagctggatgagttatactgtcagcacaaagtgtttgacattaagtaaaagaatggggttcttgttcccaactaaacagtgggaattctaccacccagtggctatcctctgaaattccatgaattgaaactagtgcttatgatttagttaatatacatttatctgtatgcatatgcagataaatgtatatttatctatttagtacataaaatctatttagtacgtgcgtgtgtgtgtgtgtcacacacacacacgcacatactaaatagattttatgaaac

SEQ ID NO: 947 - DNA, 7002 bp, Homo sapiens
  source 1..7002: mol_type = other DNA
atatgagctcaggcctggctgggctccaggagaatctttccacaaggcaagagataacacaaagtcaaggtgaagatcagggtagccctttaaaaggcctccttgtgccctagagttgccacagctcttctactccactgctgtctatcttgcctgccggcacccagccaccatgtgggagctcgtggctctcttgctgcttaccctagcttatttgttttggcccaagagaaggtgccctggtgccaagtaccccaagagcctcctgtccctgcccctggtgggcagcctgccattcctccccagacacggccatatgcataacaacttcttcaagctgcagaaaaaatatggccccatctattcggttcgtatgggcaccaagactacagtgattgtcggccaccaccagctggccaaggaggtgcttattaagaagggcaaggacttctctgggcggcctcaaatggtaagtggtgcccatctcctccctgcccccttcaccaccccctgggattgttcaggtcttcagaccatgcctagaatggggcttccagctccaacaacctgtaattcttcccaaagtagactagtgggatgatgtgaagggagtgaaccttcagacccccacccagcctctaaattaggcaggaagaattaaaggaatgtctcctctaccaggctgcccaggaggtgggatgggaggaccacagtggtctgaggggtcaaggaatcctcactccactcctctctctgagcctagacttctctaatggactgagaaggtgcatgtacagcacttagcctagcacccagcacagtaagtgccccttatacagccaggattcatgttacttttcatggaaaatgggggcagtgactactgtcctccatgaaagctgctggggagaattagcctagctattgcaggctgggattgctgctttcctggtgctatttccagctactcaggctcacaggggcagttttctacaatgacatttcagggttgctgatgagcctcccactcagcagggcccccagcctctcagcattttttttttttttttttttttttgagacagagtctctctctgtcgcccagcctggagtgcagtggccaatctcagctcactgcaacctctgcctcccgggttcaagtgattctcctgcctcagcctcctgagtacctgggactacaggagcatgccaccatgcccgctaattttttgtatttttagtagagatggtgtttcaccatgttagccaggatggtctcgatctcctgacctcgtgatcctcccaccttagcctcccaaagtgctaggattataggcgtaagccactgtgccctgccagcctctcagctttgatcaagccaagggttggtttattttttcttggaccaatcagccaggtctgctgaccaactacctagctcccacctctgctggcttcctcccgggggcagagaagatggagaaggctagtcatgtggatcttcagggtcaggaaatggaaaagggaggctttggacccttttgctttggggggcacctctaggaggaggcggctcggcccaagtccagactgggtagacaaaacatctgcactctccaaatgtgggcttgtggctgggtatgcaggcttgcaatggaagggtaaacctgagtgaggtgagctgtgcctttagctcagctaagggctcagggaaaagcagagatctgtgcagtcctcagcctctacaagctcacctgctccctaccctctggacaggcatagtttagagagtttatcccatccagagttgccttcctgtggtcagaaactgatgagcaaaaagaagcccagagggcaccctgtcagcgaaaagaaccccaatgctgctgcattctaattaagggttctttctttctccttgatctactgtatttctgaaggaattgggagtaggaggccttagggtctgtcctaccaagtccttgcagtcatggtggagtgcagtggggctgtgcccacatgggagtcagcatgccaggtacctgccttctcctccaggaaggaaagcagggaccagaggtgtaagggcaagagtggggtggatggtgtgagattcctacagccttgcctgctctctaaaggcaactctagacatcgcgtccaacaaccgtaagggtatcgccttcgctgactctggcgcacactggcagctgcatcgaaggctggcgatggccacctttgccctgttcaaggatggcgatcagaagctggagaagatcagtgagtgccaggctggcccctggggctggggctggatcccacaggagctgctggagggagaggagggttgggcaggggtaagggttaggactagagcgcaatgcagccttttcttggctactgctgccatctagtggccatctgctatctgtcccccgctcctgttaagaggcaactggtacagagagggggtaagggtgctgattcatttcccaccctcatgccccctctcccttcagtttgtcaggaaatcagtacattgtgtgatatgctggccacccacaacggacagtccatagacatctcctttcctgtcttcgtggcggtaaccaatgtcatctccttgatctgcttcaatacctcctacaagaatggggaccctgagttgaatgtcatacagaattacaatgaaggcatcatagacaacctgagcaaagacagcctggtggacctagtcccctggttgaaggtgagatgctgccagccctgccttcaggttctagtagaccctgacattgtccccaatcttccttcctttttacttccctgctccagccgcaatgacccatctttttcctgattacctccgccacctctacctcctctgccacttaaaacctttgccatttctctgcagagatagatttagccttttaattatgcaccttagtactccagataatgaccttcatttcttttccaattaccatgtgccagtactaagcattctatacgcattcatcgctgaattccccttggaagtaggttttattatccccattgtgcaggtgagaagcaggcttagcggggttaaggagcttgtctgagccttcaggctcatgtctctctcactcctaagggctggacacatagcagagtcagcgcttgatgtttgattgaatggggaaggagaggtggagaccacgccctcctcccttgtttagaattgtcttcgtcgtcatgataaacccgttctgtgtccccatcttgccttccattctggctgaaggtcaggggtggagtaggaacttccagagacagaaagctaagatccgcctccaggagagactctggcagctggagaagcaaaatggaagaagggtggatttaacatttctttttatttcccagattttccccaacaaaaccctggaaaaattaaagagccatgttaaaatacgaaatgatctgctgaataaaatacttgaaaattacaaggtaggtgatagagcagaagagaatatgagttaggctaaaagtaatcacaagagcagggtggagtccattctacacactgtagaagcttcaaaaccaagcagagaacctggcacatagtaggtgtacaataaaaactgacttaagggctgggcgcggtggctcacgcctgtaatcccaacactttgggaggccgaggtgggcagatcaattgaggtcaggagttcgagatgagcctggccaatatggtgaaaccccgtctgtactaaaaatacaaaaactaggccaggcaagatggctcacacctgtaatcccaacattttgggaggccaaggtgggcagatcacctgaggttgggagttcgagaccagcctgaccaacatggagaaactctgtctctactaaaaatacaaaattagccgggcacggtggcgcatgcctataatcccagctatttgggaggctgaggcaggagactcacttgaacccgagaagcagaggttgcagtgagctgagatcatgccattgcactccagcctgggcattgcaccaagattctgtctcaaaaaaaaaaaaaaaactgactcaaggagttgggatcgaaaagtgaggaactgaagaggatcctagaagagacctaacctctccaccaaatttaaagagggcccggggctgcctcctacctccacaagttcgtaggtcctgcccagacttgctctacttccaagtggaaggagccttgttatctctagtcagggacagaagtatggcaggagtgtcacagatggggctccttccttattaatgtctcccaacctcacccaacccaggagaaattccggagtgactctatcaccaacatgctggacacactgatgcaagccaagatgaactcagataatggcaatgctggcccagatcaagactcagagctgctttcagataaccacattctcaccaccataggggacatctttggggctggcgtggagaccaccacctctgtggttaaatggaccctggccttcctgctgcacaatcctcaggtgtgcttccccctcattgatcctagaccccagccagcccaatctctgggctccagagaaagggagagccaattctctcaggctttctgtgcaggaagactaggcctgccctgctccttacccaagcagtagttggctttgaccccagagtagagctgccccatcttctggaagccgggcctgggccccagagccactactgggaagggactggacaggctcttctcgatgtcacagttggattcttctctaagcccttgcttctcctgggcttacacacactagtcacctccaacctactctggtcttcaggtgaagaagaagctctacgaggagattgaccagaatgtgggtttcagccgcacaccaactatcagtgaccgtaaccgtctcctcctgctggaggccaccatccgagaggtgcttcgcctcaggcccgtggcccctatgctcatcccccacaaggccaacgttgactccaggtgtgcctgccctcccagtgacatctagccccatgatgcattcaacactgcttgccagcccacctggctccccctacccccggcccctgctggccaacctaaagtcagtcaaccatcaactactaaaaatcatcctgccggccgggcacggtggctcacacctgtcatcccaacactttgggaggtcgaggcgggtggatcatgaggtcaggggttcaagaccagcctgaccaatatggtgaaaccccgtctctactaaaaatacaaaaattagccatgcatcgtggcgcgtgcctgtagtcccagctactcaggaggctgaggcaggagaatcacttgaaccaaggcggcggaggttgcagtgagccaagattgcaccactgcactccagcctgggtgacagagcgggactctgtctcaaaataaataattaattaattaaatataaaaatcatcctgcccccagccccgtggctccatgtctctaccacctacagacacgcattgactcatccacagatctgcctgacttcccagaggagcttcctgctgccctcagagacatgtggtctgggatgaaaggctgggagctccatgttccaaccagctgcagcacgcacataacatgcgctgcagctccaaacgcacacccacatacactgccagacaccaaagtccacagacacaggtgttcagacagaagcgcctgttaggagggaagggatggagaagggctggatttaggtttgatctggcagaagctgaggaaaacatgagtgagtgggaatgagggagtaaagggcattttcctcacggcggaagaatgagggggcatgaggctgagcaaggaagggagtacgaagtcccagacccacttttcctcttccactctggagcagcatcggtgagtttgctgtggacaagggcacagaagttatcatcaatctgtgggcgctgcatcacaatgagaaggagtggcaccagccggatcagttcatgcctggtgagtctgtcctgtcctgcgccctgggccacacagcgagcctggactctgctccaccaccccagtaccccttcacctctgccaagcttgctgctagaaaactcttggctccaactatacggacctgttgacaccctcatcctgccatagacttacccaaactcttcacagctgggtttcccacgctcttcttccaaccaactgcaaattcaccctccaagaagccctctacgcctctgtctgccattaagtctgtcccttctcccctcggatggtgctattttcataggttaattccatctcttttccatccttcctgaatatttcatttcctctgtgtcgttaagggctacctgaaagcagggctgtatctctccccaggcgggggttcccccataataaggctacatcctcagatcagggttccctgggcagggccatgtctccccctcaaccagggcagaaccatgcctctcctccctcctgccctaacccctggctgatgccactccttgcctgcagagcgtttcttgaatccagcggggacccagctcatctcaccgtcagtaagctatttgcccttcggagcaggacctcgctcctgtataggtgagatcctggcccgccaggagctcttcctcatcatggcctggctgctgcagaggttcgacctggaggtgccagatgatgggcagctgccctccctggaaggcatccccaaggtggtctttctgatcgactctttcaaagtgaagatcaaggtgcgccaggcctggagggaagcccaggctgagggtagcacctaaaggctgtaactcacagcccctgtccaccctatgtggccccacaacacagatttagagatacaaccccccacccttctccgccattcttccctactcccaacccactctgccttctttttcagcttgtggcaatgccagtgatgtgcataaacagtttttttttttccata

SEQ ID NO: 948 - DNA, 1901 bp, Homo sapiens
  source 1..1901: mol_type = other DNA
cactaggtctggagagacagcaaggtgctgtgcggcagagcatttggggtctcaaagaagcaggtgagcctgggcccgaggggctgggtggaggagcaccttggtgcttctctgctggggaagggacaggggacagggcatgctcaggaagacaggcaggctgaccccgcctggaaggcacccagagacaagaggggtgggcgtagtgacctcgtgcccttttaggggagatgctgctggccagaggccgttagggcccccactaccaactccatgttactctctctcaccagtggccaccaccatggatacaggccccgaccagtcctacttctccggcaatcactggttcgtcttctcggtgtaccttctcactttcctggtggggctccccctcaacctgctggccctggtggtcttcgtgggcaagctgcagcgccgcccggtggccgtggacgtgctcctgctcaacctgaccgcctcggacctgctcctgctgctgttcctgcctttccgcatggtggaggcagccaatggcatgcactggcccctgcccttcatcctctgcccactctctggattcatcttcttcaccaccatctatctcaccgccctcttcctggcagctgtgagcattgaacgcttcctgagtgtggcccacccactgtggtacaagacccggccgaggctggggcaggcaggtctggtgagtgtggcctgctggctgttggcctctgctcactgcagcgtggtctacgtcatagaattctcaggggacatctcccacagccagggcaccaatgggacctgctacctggagttccggaaggaccagctagccatcctcctgcccgtgcggctggagatggctgtggtcctctttgtggtcccgctgatcatcaccagctactgctacagccgcctggtgtggatcctcggcagagggggcagccaccgccggcagaggagggtggcggggctgttggcggccacgctgctcaacttccttgtctgctttgggccctacaacgtgtcccatgtcgtgggctatatctgcggtgaaagcccggcgtggaggatctacgtgacgcttctcagcaccctgaactcctgtgtcgacccctttgtctactacttctcctcctccgggttccaagccgactttcatgagctgctgaggaggttgtgtgggctctggggccagtggcagcaggagagcagcatggagctgaaggagcagaagggaggggaggagcagagagcggaccgaccagctgaaagaaagaccagtgaacactcacagggctgtggaactggtggccaggtggcctgtgctgaaagctaggtcctccgggggaggagggtgtagctggcatgtcatcctcagggcgcttcctcgctcacgccaggagggacttggagtggcgagctggggcccgatggggcttgggggcagagtagacatctagcctccctaagggtatgcgcgctaaagcccagctctcgatctcacctccatccccatccacccacacactatggattgggctctgggaaggggtcagggtgagaggctgctctggagaacaatgaggtcctcatagcagcaggcagctcctgtgttttcttgagggtggcagaggagctaagagcagtgcccagggtctgagggggctgcccagtgagtggcaggggcaggagaggggagaaccccatcctcagagctgctcccagccagcgagtcaggagcgggggagacagggctccagggatgaggccgcattctgctcccacagcgccttttccagaaagttcccattgctcaataaatgtggatcatcagagacatttatgaacaatgacagaagaaaaattacccaaataaatgtggaagcaagcaa

SEQ ID NO: 949 - DNA, 25721 bp, Homo sapiens
  source 1..25721: mol_type = other DNA
gccgcgcgcgccccggcccgcccgcgggcgcccacctgcagccccgacgggaggccccccgcggccgcagccgctgccccgggccgggcgcccgcggcggcaccatgagtccccgctcgtgcctgcgttcgctgcgcctcctcgtcttcgccgtcttctcagccgccgcgagcaactggctgtaagtctggccggggccgagcggggcggggcggggcggggcaggccccgggggcagcggccggtgccaggcggcgcggggcagcgggcgcggggcagcccggcaggtgtctcggccgcgggaccggaggctcgctcgctccgctgccgccgccacggcccgaacgtccctctgcacacccggggtcccctcctgcccgggtccggctccctgcccagaggcgtcaggggtggctgtggcggcgtccgcaccggtaggcggctcggggctctcgagggcgccaggggtgcgagcgcggggcggtggcccgggaggggcgccggacgcgggttgcagtccagccgggctgacaggtcgctgaggaagcccattgcagggaagggctccgggacataatagcaggttaatcccgagaagtccggagcgagctcccagcgccgagctgcgccgagctgcgccgcgctgcgggctgggctggaggcgtgcagggacctgtttctgcttggggggcgggagccggagacagaaggaagggaccaggacgcctggtctcccagggcccggggctggcgctggcgctggccgggccttggtttttccccggggcaggaagaaactccgtccagaccttaaagaagacaacggccccccagctccccgtgtctagcctaaggaggaaggggtggtaaccgctggtgacctgtctgtttctccttgactggatctgcgctcagggcgctccctgggtaggggcggaaggtttgctgcagggagggagactaaagggatgagctccagtgagtgggtggacagggagcaagcggacccgcgctcctttcatccccgctcagggacagttccccatgccccgcgcttaaccctggccccagttcctcctgcccagagctctgccaccatccgctgtgggcagccagtggggagccaagctccaatattgatctgaaaagcatggggtgggaagggggatcgccaacagtgtagctggggtttccatggagacagggagagaggaaaaaattctctctgcatcaagaccaaagaacaaatatctcccatgaaattgccccgagtgtccaatggctgttgctatgaggtcattgtggccagccagagccctccaggctggaaggagtgtgttcgttggggtcagagccacccagggcttgggggacggaggtgatgtggaattctcccagctgttccgagagcaaacgactccaaggcagcccgaagtggctgcggagcttttgtttttcttggagccttaatttgattaacacttcaggagcagtggcagagtgtacagaaagcaaggcaccaccaccttctcccactgcccccctgcaggccaccccctgaatggagcctgggtcacagagctggggagggagctgatttggacttggaggaccctgggtgtccctggagctggttcttgaatgcatgggttcagagcgggggcctccaaaacagatctgagcatcagaaggagcaagaactgtgtctcacctgcccagcaccgccaaagccacaaaaaacaaacaaacaaacaaaaaacaaagaaaaaaaagtggcagtccaagcgtctggcccaggcctacatggaagacagcgacatctgcagtggaaagtccttcaggaacatctcatctttgactcagatgaggaaactgaggcctagggagtggaagctacttgcccaaactcagagctgagaactgaacccaggtgttctgactcccaggcagtgaccctatacccccttccctgaagctgtcccaaagtggagccagcatggcccggtggcatcaccactcaccttcacccatgtccacccccagaatcccagccaggaaggcagcctcggctttggatcatgcaaactgtggggaattccaacaactcagttctcctgcctgtgctgttgggggtggggtgaggaggggcagcctaggagaagagaggttggcaaacctgttctctgcaacggtgatggttcaggttgccacgaagcaggtctctggatgacccagctcactcctgctccacccccggcttcaagccaagggtctctctgctccacccaaggcaagaggaacaagaggcttcccaggaccctcccaaaccagagaggctatgaaggagaagacactgggcacataccaaggttggtccaatatttatcaacctctgtcgaacaatcagctggccaggaatggcagctctgggggaaatggatgtcacagcctggcctcccacaagcctggagtctaggtagaaagacatgataaaaccacgactgggtggaacagggcacatgctctatggctgtcagaggaaagagctgagtgtgagcccgagcaggcacagagggggacttggtctgaagactgtatgatcatgacaataataattattatgatgactcccacagcatgatctaaatcccaacaacgtttcaatcccgttacagatgagaagattggggatcgcagaggtaactgcccaagtcacccagctggtaaatgccagaggtgtccgactgaaaagctgcctctagaaggaaaagcttcggggaggcaggtgtccatgcaggcatgatggctggcactgtgtcttttcaagtgtgaggtatgaggaggcctggccccgagaggatagctgacagcacctgccaaggagcaaggtctaggttccgctcgcctcccaataccctggagtccagggtgggtctgctggccagtggcgagagccaggactatctgttgtctcagaagggcaggtggcctggtggggaggccaggtgtcccgccgcgtgcagctgttgggcaggatggagcctggagctgggagggcagcctgaggcctgggcaggcccagagaagctgggagctgttgattagactctcgtctggcacccggaggagcccgctgacagcttgtgacggctcccaccactgagggagggcccgatggatgaagagtccctgggggaaggctgggactctgcccttaaggaggctgccctgccacggacctgagctcagaaatgtttctaatgtcccctcttccctgcactgaggctgtaccgggagtcaggatacctgggttccagtcccagctctgggccacatattgggtgtccccttcctcccttggggccacagtcctcagcagatcgttctgaaccccaaatggaagtgctggggagggttagggaataaataagctaaggtttcaggactgtggatttctgaggaaagtagtggggtagcggggttctagcagaatcccacgggtgaggggagggggaccacgctgcactcagaggcaggccggcggcatggccaagaagtgggtctttgagatccaaccgagctctgccctgcccagctgagtgaccttggacaggttattaacctctccgagcctcgggtttctcatctgtaaaatggagcccactgatgcaaatggtgcacaatggtggttgggaagaaagagcgagcccatgcgtgtggcaagctggcactgggccaggcacgctgatggaaatggcagccctggcagctgccggaagcaagggctgctgtcagggagctgcagggctgcgtccctattgataggggtggtggagaaaacgggccttcaggctgctgctcccaagccctgtttatcccaggctgtcccacccagatccactgatttaacacaggtaggatcctaggctgcaacccccttgctcaacaagggcccccgcaggagcctcccagagtcaggaagacctagcctggctcacaagccaatcttgccaggcagaggagttgctgctgggagcacctttccgtgccctgggggcagtgaaggacgcatcatgctttccattggctttgagtccccactggtgtgcgacttccggccaagctcccctgagcctgcttgcccgggggccgggggacagtttatatctcccttggccttgggtggagtgaagcccaacactctgggcacaactccctggggcagggatggggcacggccagcccagatgtgcagtgccaaccacacaggtaaagatgtggcccacctcctccaggaagtgtgcccttgattcccagctttaaaagatccctctctcccctctaaatagtcaaaaatccgtctccttagagctcctccgtggctctgggcagtgaattacaatcacaaacacccccacagtacttcacagtttacagcaggatttctcagcctccgtatcactggtatttgggactggatgagtcttctgtctgggtctcttctgtgcattgcgggatacttagcagcatacctgacctttaccggctagatagccagtaacatccccccaagcgaaaggacaaaatgtctgcagactttgccaaatgtcccctggggggcgggcaaaatcattcccccaggaatcaatggttggcaaagatctttcacaaccattacccatttgaaccacacaccatcccctccatgcctcaccacaaccactttcagaggacaggagtgtagattactttcagccccacttcagaggcccagacgtgcaatgacttccccaaggtcatcctgcaaatcagaagcaggactggaactgctctcccatgtccagattttacagctttcatcccctgcctatagaaccgtttcatattatatataactctagtctaatcatgtggtttctttactgcttctacaaggttataaacatctggaggccgtggctgtggcataaacacctctgaatatctcacagtgcctggcacgtgcctgtcaggtactaggtgctcagccgatctttgatggatgaatgaaaggtgggcttgtttagagggttctcagctgttgtccaatggtagcccatcttcaaaggcctgcagtaggaggaaggctctgctccactgccctgaggctcaggtgatactaaaaggcacagaggtgggtggcaggaagtgtgtctgttgcccccccgatctgctgctctgcccctcactgctgggccggaacagaccctgagagccaggctgagtgtttctcccccagcactgcagcaccccaggaccaggctctgcccgagggggttgctcaggcagcagtcacgacccagctgtctgctatggtttgactttcttccctcagccctggattagcaattgagcaacacagcaagcatctgacaagacagtgctccccaaacctgttgaaactcgcccaactcaggctctgtgggtacactgggaaagctgagcatttgcaccaagcctcctcctcttgttcctgcctctgggaagaggggcttgggcttagccagtggggcgcagattggccagggagccatgggtggggtgacagctgcctgccgtgggccctccagtcaccccttcactgcatggagcaggcgcagctgcaggcagagctgcgaccccagggttgctctccagatttccacaggagttgccaggttttatctctgagtcctgaactgcatcttctgtgattcagccaaactcgggacggctcgctccctgccgtgaccccaccagctccccctcccccatgtcctggcaaactgaaaccaaactgtgttctgaaagttccctgccaagtcagaccccgcagaggaggggacctggtctgaggagagagcgggagggaggtgggaggaggaagggatgcgtcctccaggggagaggagcctcggacagctcacatgtatctttggagaggcccattagaacagcaggaatgctgatgggcctcagggcccttccccgagatgactgtgaatggtcccttcagaccctatttctcaatctgttcacacacaagccctgaaatcccaggattgggccctagagacccttccccaagggctggagacagcagaatagcccctcctgagtcgggtgcccagctgttccggcaacccaagcttcgaggcatgagtgtgagggggttcttggggattctcagtcaaccccctggggaaccttcctgccagggagggcctgggatgcccccaggcaaacatgtcgagcacttcctcacatcaggccctgtgctgggcacttaggaccatacagcatggcggtggtagaaccaggactccatcccaggtctcccagagctgttcccgcagccgctgacagcagccctgcagccctgcagccctgtacccccagccagttattctctgctggggggatgagccccaccctggtgggggtgggagtaggggttcagccacaggctctcctaggactgggcctttggaaggtatcccccaaggccgatgaactcactagaaaccgggagcctcactccaggaggccagcactggctctggacagttctgctggggtttcacctgtccctcctctttccccaaccccaggttccctcagcccagcagggaggacagttcaatgggtcagtggccacaggacatgaaaggttgtggggacacaggtcggatgggtctagcaaaggaagagctctctgctggcaaattgggggacaaggtgaggtcagaccagccttaaatttgatacccactccccccaacaacacacctgcctcagggagagaaggcaagttctcacctggcagagctctggggccatccaggctcaggtccaaggggctactttgtggccctgaggcagccaccagctcgctgggaatacatacagtgagatgggaaatggggttgggggctcccaaacaggaagtgggggacacagagccctcaggagtgaaatgtagggggctagggtaccaggatactggaagtaatgagaattgggaaaccaagagtcagaaaatgagggcactgaggcttccaaggataggagatgggagcgaggggtcccaggagacaggaaagagggaaaggggcccaaaggtgcagagtggtgtgcactggcggtggaggcctgggttccaggggaggccgttctctctctccgcctgaggaaatgcacctgaggccaagaggacttggcctgggccttgagagacctaggaccatgctaaggctgaggggtgaaggcagcacccactgccctgcaaaccaccatgagtgtctccaaagcctgcccctccaggggttttggaccagtggcagcaacccttccatggccccaacagctacagagaccacaggcttccatactgtccaggcagtcccgtaaccacccagacatctgtccccagcaccccttactcctgaacacagcccagacacctcactgtagttcagaaaagacatggggctctagaaagacccatcaagggaagaatcaggcctcctccctcaggtcactgtctgttgactgccaaacttcatgcctcagtaccctgggtcatctttggcttaggagccagagtgacccgttttcaaatcctgaccttccactgcaggctgcatgggctcaaacacatgcttctctgagcttcagtttcctcatctgcgaaacagaggggaagacacctgcctagccagccctgtgctgttgcactaaggacatactgaagcacgtgactattgattgcagagtataagtgaaggtcccatgcatccactctgtgatgcccacaaatggtttccaagtccccttgacactcctgagcttgtcctgcacaccactgtccctgccctcaccccagtgtcccagctcttgatgtcctagcagcaccatcccctccacccatctctcacactccccagcctcagagggtctgactgacagtcgccaggaaacacatcctcaaactctgcagacttcatctggagactctgtcaaaagcctgccattgggatggctgctgaggtcatccactgtaccccgggggagcgtgtcccacctctcaggcatgatcagctgaaaaaaagactgggaacccaggactaagagggccaagagacccaagcaaaaaaacacacacacaaatgagcagaagtcagcatgggtctggtctggggtgcagcagaggggtggccagaggaactgggagaggctgtgggaggggtggtgacggcaccgatgacagtgagcatcttgaaggtgctgctaggacaatgctgcagcagggacgagcatctcctgcacacagatttcattcatttaggcctcctgcgtgcaggaattccagtctccccactttacagatgaacacgctgaggctcagaggtgttcactaacttgcttcaagcaacacaaggatgacatttggacccaggagtccctggtccatgtcctttctgcactgcctgccatgccaaaagacaagggtctccaaggctagggcaccatcagggggagcacagcaggataccaagactgtggttatagaaacattcaaagatgtaaaagtgagtggggggtatggttaggatcttgggaaaccaggtaccatccccctaagaacacagtcctagatggggactgtggtcactttcgcccccactggcccgcatcccccaaggcagctctgttcagcagccactccgttttcttccggctccccctcccacccacttggcctccttcctccctggtatcgcaggcacgaccgctcctgaggaggctctaaatgtggcccaggcaggcagggaggccaaagggagggggcagagaggcctgcgctggcgtcccagcccccacctggacacccgcagggccgggacccacgacactgatctgcttggcctcccaaacgctccagctatttcccgtcccctctcctcttgactcacagcgtaagagctgggaggagtcgcagaggtgcagattttcctctaggaatttgtatattttttttaaaaagcaagcaaacctggaaaagcttgggacaagcccagctaattttagtttctaatgaaaacagcaggtggctgagaggatctgatctccctggcagggcaagggccctccagcctcgcaggctgtaggcacgggccgggctcggggagggcctcctgggaggagcctgcaggacctgcagcccccgttggagaagatcagggcatgagctggctggtagcagcagcaggggcggtctgggctggtggggtaacctgatcaacggcatggccatggcgagagtcctgggtggccagggcagcaggtggcaaattgctaagcctgtactccgtggtggcaggaaggagcctaaattggggcaatgcagccacgacaggagaagcctcagggatggccaaggccctgcacagcctggcccggcccacccatcacgccctggctctctgtcacccctagaaagggctggtgcactccatttttgagcctggtccagctccagggtcagcggatggcacacgtgtctctggggttgagccaccctagggcactgggaatcctgaggtgtccagtactaatcaggcctcgccctgatgggtctccaggctctcagcagatcaaaagaccacagcagcccccacattcctccctcatccttatcttccccatcctgagcactctgccaggagggaagcagagggaaccccgtcaggacagagccctccatcctgctgcaggcatttattaaacaccttctatgcactgtgccctgtgtgaggcaccaagggcagtgttagcccccctcagcaggtaaatggggcatatccacagccaggtacagaggaaagagagttgagagttagggctgggtttgcactgcagctcgccgctctagctgtgggactttaagcaagttgctttatctccgtagcctcagtttgttcatctgtgaaatggagccaaatgctagttggatactgaaacgggcaagcagaaacattgtggatgagggcctgtaatgcctggggttctcactctctagagccggtgcccggttccatttccagccctggcacccagccctgcccgggcgagaccctggggtctgggggaacaggggtggggatggggctgggcctcgtgtgtacggaaggggacagctgctgtgccagatgaaggcaggggctgggggtgggcactggtgccaacggaagaggttgctcagctccttcctggaagctggcccagtgactcacggccacggcagcccagcagctcaccctaagcccctgcgactgtcattcagccagtctccccttgctgagttctgagcctgggtggggggatgcaggtggctcccctggtccatcttactacttattcaatggcagagacacatctatcagcctggcatggggccagcaggcccctgaggcccggccactccccaccctgccagtagaaggaggcccaccaactccgacagtgggaaaggccatatggacccaccggtttactgtacccataaggagacaggctccaagtatggcagggacttgcccaaggtcatggtgggtcagaggctgccccccctgcccagagaacccctgcccttgggtgcctcccttgaccagagcccagggcccagcacagccagatgcagccttcttggctgcatgctgtgggagcagagactgagttggggatgggccagctctgtgcccccacatcatagagcaaacagggcccccacccttctccaagaggccaagcctcggtctgagcaggaaaggatccaacgtcaggctcaattccttgtccccccaccgagggacacctgtggcctgaacgtggacctggcccacagccagtagccgggctcttggcgccccctgcaggccaagagcaacaggtgggactggctccacaggcgaccccttggctgggcacaggcaggagagcacccaggcagggctgagaagccgggtgggcccctccccttccaaatgcagcctctgctgcttctcagcccccttcctgcccttgtcttccctccaaggggctccgagctcctgcctgggccttgtcaggacaccaccagtctgtgcatcccctgggaaccacctggtagataggaaggaggggcggggaggcccctgggagaccaggaatgcagggggtggggaggggaggttggccttcttcggcctgagaccgcctactttgcacttgccccatgctgtacacttgcccccacaattacctggcacctagaatgtgcccagctgacagccaggtgcatcacacagcaaatcacgggcattcctcttggcagccctctgggtgagaaccgttatctccatttacagataaggaaagccaggctcaggctccacagccacggggaaaaggaaacatcctggggatcaatgccacagtgaggaggacagtggcatccctgagtcagagctccctatggctgagaaggaaacattacccatacttatgcagactgttctccaggccagtgcccacctagcctcccaggtgcacctaaggcacattcaattaacctcagaggcccaccaacccccactgggactggggcccaggcacctccaccttcaacaaaccctgcacacgtttcgatgcacagccagattcaagaaccgtcacttggtccaacccacatacctgacaaataaaatttagctgccgcctgcaaacctccagggatggggagacagctccccagctgcaccctggctagcatctttgggttgaacaaacccagctcccagcagcttctggccacagtgtcaattctagtctttgagccacacagagaatactgtctctgcccaaggctgtgaagccaggcaaatgccaggttcaagtcctgctcaacctcactggctgtgtagccctgcacatgaggtaaattacttaaaatgtctgtgcctcagtttcctcctcttttaaatggcagctggttggctttctgagaggattaaacgcaataatgtaaagtacttagcccagtcccaagttccatagaagtttgatggaacttccataagtttcttcttatcatcagaaagaattcccataagtaggactttctgtgtgcttttctatttggtcaccattcattcattccctcattcagcaaacaaatggcgacttcctgcctcattgcctcgggccagtgtcaggccatctctcacacagatccctcttgctccaggtagcagttcctccactcagacagaaccggtgttcccttctcttactacagatgaggaaactgaggcccaaagagcagttaccttccctttatccttcttcaacaagaaatttgtgcagcttcctttataagatgcaacagcttcttcacagccaacccctagaaaatccccaacccttgggagactcagtgtgctgggcaagcccctgggggagggagagcatgctgcacttggcttttgaagcgtccacacagcccactctcgccaccaccacccataacctgaccatccctagacctctagcccatcactgccctcattgtcccacctccaaagggtggcagcaatgacactggtctccatctggtggtcctaggatgtggctggcagtgaggatcttggtcttgtggccagaagatcagccaaggatcactggggttcctgcctaggacagggaagagagaccctgggcagacagcggctccagcctcctagctagaaggcatctcggcagggaacagtgggatcccatagccaggtctggggtgacgtcctggcacagacagtggcacgggggctgccagggcagggagggatcccgtaggggctcgatgagcttccctcccactgctgccacctgctttgctgaacttgagatagaggctttttgcagaagacagcatttccactcccttggtgcccctagagccgggcaagagggcctgtaactggatccagagagaagtcggcagccaggcccagtcactgggacgagtcagttcccagagacccgggctggagctcaggcctggtccggggccaggaaagatgaggaggtgggctctgcatcacgtgtcaccctctccccaggtacctggccaagctgtcgtcggtggggagcatctcagaggaggagacgtgcgagaaactcaagggcctgatccagaggcaggtgcagatgtgcaagcggaacctggaagtcatggactcggtgcgccgcggtgcccagctggccattgaggagtgccagtaccagttccggaaccggcgctggaactgctccacactcgactccttgcccgtcttcggcaaggtggtgacgcaaggtgagggaagggcgtgcggggctgcaggggagcctgcggtgccagggcatgggcccagcaggaaatgagacgctcgtgagcaacgggactattgcaggtcatttctgaagcaaaaccagcacaggacccaagtgagggcataaaggatgcagagcgttgggggccccaggacaggaggatgatccaggtgggatgtatgtgtgggatgggggccatcagaagaggcggcagctctgtgttgaggcagcactcaaaagagcaccgtgtttccactgctggcctcctggaagcgtaagcaggtaattaaggaagaaactgaggctcaggcaggggacaccactgacttgcccaaggttcctcagaggaagagaagcagtcagggctcagacccgaggctctggacccctggcccgctgctcttcccaccccagcacttggcctccagtatctgggcccatcccattccttggtacacctgaacaaccctattgtgcacctccagcatagccagccctgagatacagggatgcacagaaacaggcacatggaggttaagtaacttgcccaaggtcacagaactagaaagtggcagagccagctgggcgcggcagctcatgcctgtaatcccagcactttcggaggcccaggcgggcggatcatgaggtcaggagatcgacaccatcctgggtaacacagtgaaaccccgtctctactaaaaatacaaaaaaattagccgggcgtggtggcgggcgcctgtagtcccagctgctggggaggctgaggcaggagaatggtgtgaacccaggaggcggagcttgcagtgagctgagatcgtgccactgcactccagcctgggagacagagctagactccgtctcaaaaaaaaaaaagaaaaaaaaagtagaaagtggtagagccgggactcaaccccaggccgtcccgctcccaggtctgtggtcttatcctcgatgaggagacgctgtgatcaatgggccaggggagcctgtggaagcacagggtggacaccacccctggctggggctgggatgctcagggaaggcttttccgaggagattggtcctcagctgagaccagaaatgtgagatggcattaagccaaagacagggggaccagggcatagagaacggtctatggaactggaagtctcctccagaggtcgccggccaagctcccgccctcaaggaagtactctaaaccatgggcccctttttctacttcctgagcatgaaactggcacttccgagccactatccatcgacaaggccctttgacttgttcaggcagcaggaaggggttgcctgggccaacccttctcctgacacctgtggtcctggacggccggggctgctgggcttgtagcaaaccatttggatgttgctagaaaccaactgtgatagaaatttggaagtcattctcctaagagctggcaggggccaaaaaggcatgatctcgcttggcattgctgaacatcgctgctctggaaaagcaacagagacccagtgagcagcctggcagtggaggatctcccaggataacagggctgcctggttgatggagccccagaaacagcctcaaacagcagcccatgagcctgggaagcccttggacacagtaggtgtgtattggacagattggtggatagattggcagggtttcatatggcaggctgtcaccctctctcactcctccctttgcatatgcaatgtcctccaccgcaaacacccaagcccccttcttgagggctcagcagttccctcctccacgacaccttctcagctcttccctctgggctccaaagctctttgttcttgctgtgggatttttttaaaatcataatttcaaacttacagaagagttgcaaaagtaggacaagtaattcctatatccttttcacttgattcaccaacagcttacattttcacccatttgctttgttattctctatttctatatatagacacacatttttgtctaagccatttgtgttcacactgcttctagcacaccttttagattgaaatgcgtatctcctcacccgactccactcccccatcactaggactcgggccctttgaaggcaaggttcatggctcattgacctgtttcttggcaggtggcaaagcctggcatggaggagacagtggatgtcatctactgacagaaagcaggtcaggggagaggactcaaaggcgcaaggaaggaggtagcctggggcaatgctggcctgaagccatcgtgggtactcaggaccccatgagaagccctccttacctttgggggaggaaccaagggggcacccacaccggctcagcatctgagggacactgagattcctactaggcctgggtggtacctgctctggactaaagtctgactggtggagtcgaacgtccaatcccctttggagagggacatgtcaaggtgccgagactaagccagtcacactcggcaggtgccagtcacacctggagaaggaggctgagctctgcccactcatcaaactcctcccttttacgtttttggttttcttccctagtaaaattcctcttggaaacttcttaatttgtctccactgactaagaggaaaaggggattgtccctcctgaggtctgagagggaagcactgctctcagaaggtgcagggattggctggtgaggcagatggaggaagggtgaggccgaggatgacctgggacaagtgcctgcactcccctgagcatctgtgtccttgcctggcaacaaggccacacataggcccacctcatgaggctgtcacgaagatacagtgatttcatgcatgggaagcacttcgtgtagacacgcctcccgtcaccagctgctgtcatctgcagtagcctgtgtaagcgggcctcactcacatgctctcaggactgggggcatggccggagcctgcatacatgagcggcctggctgggttgtggcgtcagacatggaagacaaagctagcaggccagaccagacccaccccggggtctgagaggagaggagcccccatttgctgagggcctgtggtgtgctatcacgtcaggtcatcctcgtgacactgagtttacagtgctgttctcccacatcacagctgagaaaggagacttggcaagcagagggtggtaacatccccagccctgggcctgccaactcttggctgggagattctggggaaggtccgtgccctctctaagtcccagtgtcctccttgaccactccaggaccagcctcctaggattcccgtgaggatcagagagatgatgcctaggaagagctaactgacccccacacggctcagggctgggggggctctcccactgccagcactgccccaggtctcacagcctcccctgctcctggcctggaggcaagatggacagtgaaatgatgatgaatgatgaggcaggtgtgtaattcggggcaaaactgtgtgttctaggctgaaaatctaccaaaaatttggtaaagatggtatctggcacagccgggagggcggggatcggtggttcttggctgagcaggtattcagggctagatgagggatggcctctgtattttagtcactacttaatcccaagccctagaacaggacctgcacataataggtaatcaacaaatattaaaatattaaatgagcaggacctgcacataataggtaactgataaatattgaatggatcgttaaatactgaactgataaatatcaaataaaccaacaaatatcgaatgaaccaaagggtgtgagggtgggagggaggccatagcgcctggcaaaggtgtgcctgggcaggtgggagaggcaggaaaggcaataaaaacttcccttctcctgctgtcctccatttgtagacagcaccgggcctcctctgcctctaccgtgtctcgttctgcgaccttgagcaagtccctgtcctgagatgaaggacttgatgaattctgaggccccttcagggtctgactgctgtgactgggaggccatgtggtgccctggccatagcaaagtgagggtccaaacccaggcctgtctgtccattccccatgtctaaaccatctaggacaccttcctgactgtggcaccacctggacctaagaagcaaatgctctgtggtcttgggcgtccctcactagaacctgtgctctcacctttatcctcaatattggcatcacaccggacccagtgatggggagaacattattttctcctgggttacctctgtgacccagcctttcgatgctataagttacagaagatctggggaggggttacccccgagacattcccagactaggaatgccttgaggctgcagtggccagacacacacaagacaattagaagataaaactgggggacatcctgattctgaccgcatggggcagggaggcagagaggtgcgaggtctggcctgccggggtggcattattatccccatgttagagtcgagaacactcaactcaggaaggctcagaaagaaaggtcacactgctagtaagaatccaatacagctttggctctgaaacctttgctctttccctgatcctatattgtctcttaaatccaaaggggcttcctggaggtggtttcaagaaaaggtaggtttctgcacatccaagagagtaaaggaatctggaaaggcagactgggcagggatagaggttggagaatgggggataaggttatcctgggagacagtgcctgtcctgccccacctccccaggactccagctggcctcacctccgacaagatacgtgccctggcacccaggggatcagcaagcctatggcttcattgccagtccaactcagccttagccagttctccaaacactcctaactgcttgaatatccttccttctcctgtatctgggaaagacttcacaagtgatacgctctgaaaagcacaggcctggagtccgacaagccttggttctaatccccacttggccatttactgcctgaggaacccaggacaagccaccaagcctcaccttttcttccacagagcagagctgtagagagctcattgctaaggctgtcatgagccttagacagcacatagcaagccctcagaaagagtggctgttagtggatttacgggttaactgaattcccagccccaggcagccttagcaccttggaaaaggtggcattgaggctggacccagaggacacacagtatttaggcctgtgacgtcagaggccaggggtgctctgggaagaagaaacagcaggaagaaaggagctgggtgtgagaaggggcaaatggctgtgtgaaaacggaagaaggcaccgtagagttctgccttaccctggcccctggcccaggaaaggacaaggcgaggattgccttcgtcccttggaaagcccctggccagggagcaggatctgccaccttgctggggaacccccccgctgctacctgcccaggtggactacagttctttctctatatctgagtggcccctgaggagagtgctctgccaggtcctcctcgagcgagcagggctccagcctgggaacctgggcagagatgaggagctgggaagggccaccaccctggagtccaagggctggacaccagaaccaggtagagaaggctggaggagccgccatcagctttaggggcacagatgcttgcccacatcttccaggctttctggggcctcctgtgctgagcccagaggccaactgttcaccatcccccagtaaagaacccacagagggaattgggcttgtcctacagcatgtgaagtttggggtggacctaaggaagcccttcttggctccatatgtgggaggtggaatcaactgcatgtgtattcccaggggctcagagcctctgggaggcagaataatgtcaggtttaaaagctctggagtctggctgcctgggctcaaattctagctccaccacttcctggctgggtattgttggacaagttgctttaccactcagtgcctcagtttcctcatctgtcaaagaaggatgaaaagtatctacttcatagggttgttgggacaagtatataacacatgtgaagtccttagacagagcccagcacatggtaagctgtctgtaagctttagctcgttattattatcttccttccagaatctcttccttcaggaccactcccgagctgagaaaactccagtgttcttgttcccaaagccagggcaaaatgaacctggagtctcggtggatgaatgttggtttggggaatgaggcagaggtctctctgagcaacctccctggtggccctgcaccccagggaccaccagtacacaggggagatcagcctggggcttgggttgggccggggtggcctgggagccaagaccagcagaggaggaaggaccacgcgaggccaggctgaggcgacccgccagtctcatcagccagccccgtctcctgctttgacttcccttcccccttggtctttggggcaaagatttgtgctggttcaggcctggaaataccagaaataccagaaactgaagtcgtctctctttgggcggccacagcataaaaccaaccaacatgatcctgctattaacctcgattaactcggagaagactctgtctcaggctgtcgaggcgccattgctccagccaagccccccagtgctgacccaaaatggccaagccagggtggagagtgggcagtggagagtgggtggtgggcactatcgccagctcaagggccgaaccaagaacagggcgtcctgagtggtcggggactgagctgcctcccaccccagtgctcagcctctactgcctctgtccacagacaggggcacagagaaggtgattgtttccatctgaccacggtgactgctccctggggcagccgagagcacaggcctggatgtcacagaggtaattgccaaccatggggccaaagcctgccccctccgctcctgcggacacagacactcaggcaagagacagaaggacagtcacagcgtacagaggccctcctcacagggcccaggaggggagcatggtctgctgtctggtcacacacccagccggccatgcatactccagctcacacactgccccccacctccagaaagagagtccacaacagctacacccccgaggcacagttcttaggaggataaaaacatccattcaggcgagggacgagggcgggcaccaaaatagaaccactgagaagtcatgaggcagaggcagacagacgtgtgcttgagtcttggttccatggctctctggctgggtgactgggaccaaatcccttccccggctgatcctccatttctccgtctataaaatgggggacaatgaagcccccagtggtggagggcttatgcataataggtatctcctaattagccacagtaggggttgggggttacgtagaagctgttgttattacggtttactctaaggaagcaagacattttcagaaacaggcccagtctcagaggaaggggcaagatcatacataaggaagggcaactcctcagagcccagtggggccagctggggaacaggccagacctgagtttatagtccaggccttctttctacctgcagccttggcaagccagttcacctctcccagcctgtctggtcttccataaaccttcacgaaccttctggtgggggtagtgagaacggcttcccacaggagctgggaacacaagctctgaagccagactgtctgctggctcagtgacctcggaaaagcccccgagcctctgtttaaatggagatggtaacagtacttgcctcctggggtggttgtgaggatgacagcatctgcacgtttgaaaagccctaagccacgcctggtaaaggaagcagattcagctattggtgtgataagaacaagcgccgtggggtgcctagcacatgatttctgcctgtcttgctccctcctggcctccagcaagcaggaggctccatatgcccctccccctctacaaaggagggtgcagggaggagccctgggacccagctctgccctccctctgcctcccacagggactcgggaggcggccttcgtgtacgccatctcttcggcaggtgtggcctttgcagtgacgcgggcgtgcagcagtggggagctggagaagtgcggctgtgacaggacagtgcatggggtcagcccacagggtaggtgcaggaggtggtcagagtgggagggcagggggcttggccctggccctcactcaccgcagccctttctgtgcccaccacaccccaggcttccagtggtcaggatgctctgacaacatcgcctacggtgtggccttctcacagtcgtttgtggatgtgcgggagagaagcaagggggcctcgtccagcagagccctcatgaacctccacaacaatgaggccggcaggaaggtagtgtggcactaccccccaccaagagcggggtagggatagcatgggcagggccccagactctcccacccacacggccactcagaaaacatttgtgcaggctctcaccagcacctggcaccttctgtaggccagtggggttcaggacaggccagaggggggtacagacaggcaggcaggcgttacagaatggggtaagtggccccctccatacatatggcccccccacacacatacatatatgtgtccatccctgtctctcacacacactcattccccaaaagagcagcagagctagatgtgaacctttctctccatcaccacgaagatcatgtgcctaactgtaatgccacctgccttctggatgcctactccccaaggttcccgtggaggttaaatgcagcagtgttctccccaccccacacctgtcactcactgttgataggacaccacccttagtgcttctctttcttcaactcccagtgccccaagtgcagggacagtacctcgttcacctgtcacaacactgcttagcagcccagtaccgcgtaattcctaagaggaggcacaacggcaaatctgactgcagcgtcagccccagggaccccgatgctcggctgtcagcctccgcggccctcccctgccttcccttgccatctcctgatggcccctctcccccaccctctcccacaggccatcctgacacacatgcgggtggaatgcaagtgccacggggtgtcaggctcctgtgaggtaaagacgtgctggcgagccgtgccgcccttccgccaggtgggtcacgcactgaaggagaagtttgatggtgccactgaggtggagccacgccgcgtgggctcctccagggcactggtgccacgcaacgcacagttcaagccgcacacagatgaggacctggtgtacttggagcctagccccgacttctgtgagcaggacatgcgcagcggcgtgctgggcacgaggggccgcacatgcaacaagacgtccaaggccatcgacggctgtgagctgctgtgctgtggccgcggcttccacacggcgcaggtggagctggctgaacgctgcagctgcaaattccactggtgctgcttcgtcaagtgccggcagtgccagcggctcgtggagttgcacacgtgccgatgaccgcctgcctagccctgcgccggcaaccacctagtggcccagggaaggccgataatttaaacagtctcccaccacctaccccaagagatactggttgtattttttgttctggtttggtttttgggtcctcatgttatttattgccgaaaccaggcaggcaaccccaagggcaccaaccagggcctccccaaagcctgggcctttgtggctgccactgaccaaagggaccttgctcgtgccgctggctgcccgcatgtggctgccactgaccactcagttgttatctgtgtccgtttttctacttgcagacctaaggtggagtaacaaggagtattaccaccacatggctactgaccgtgtcatcggggaagagggggccttatggcagggaaaataggtaccgacttgatggaagtcacaccctctggaaaaaagaactcttaactctccagcacacatacacatggactcctggcagcttgagcctagaagccatgtctctcaaatgccctgagaaagggaacaagcagataccaggtcaagggcaccaggttcatttcagcccttacatggacagctagaggttcgatatctgtgggtccttccaggcaagaagagggagatgagagcaagagacgactgaagtcccaccctagaacccagcctgccccagcctgcccctgggaagaggaaacttaaccactccccagacccacctaggcaggcatataggctgccatcctggaccagggatcccggctgtgcctttgcagtcatgcccgagtcacctttcacagcgctgttcctccatgaaactgaaacacacacacacacacacacacacacacacacacacacacacggacacacacacacacctgcgagagagagggaggaaagggctgtgcctttgcagtcatgcccctgagtcacctttcacagcactgttcctccatgaaactgaaaaaggaaaacacacacacacacacctgcgagagggagggaggaaagggctgtgcaataaagtcctctcccattatcttactcaacacaatttattgagcaaatactacgtgttctaggccctgtacaggccatctcacttgatggccacaacagtcctgggaagcagacaaaccaagaatgctaatgcccatctgacatcagagacggcagtgctccccagacctctcacagcaagctggatggacaggcagggccagaagagtcctccagccaagcctcctccttggttcttgtacccaaaggtagagaaactgcaggtcttcttgggtctgagcctggggcaggggttctggctggacgaaaaggggcagggaagcagcaggagccagagaccacaggctgagctggagcccacatggttcctaagggcagaacaggctctgaggaaagatgtgaacagctggaaggctgacagtgaggtctcagcagtgtggtgcacccctccccagcacatccgagtccctggggtcccaggtaccataggtactgcaagatttcccaagagacagcaccagcaacctgggcctgaccctgtacaaccgccaaaccatcacgagccccgcccaggcttgtgagaaggacatgcatggatcaagaccttgcccttgacccatctgcttctcagatgggctcccaatcaccagaggaagttgctgtaagcccactttccagactgcccccacactggggctctaagtttcaggtcggagattttatgctctgtgatcccccacttggggttcccagactccaagctcctggctcctgtgttcagtggctgaattcaacgtccgagattcggaatatgggctccagcctgcagaaactcttctccaggcattgtggtttgtgcctcctagtgttggctccctcatgaaaagagggtcaacacccttggcccccagccaagatctctgctcaatgtccatacaaggaggaagccaaaaccaagtgaggtgctggagccacattcaaatgtggttgataatcttggggcaggccagctctgatgtggatgaaagctgatccaactgtcgccacagctgcccagctgggtccgctgctcccctggctggctgttcagctgtctactaagcccaaaaaaaatactatgcctcactagcagaggctagacccagaaagagggaacaatgaggacccctcccctcccagaggaaagagctgagccactctccccatccagggaacagtaggtccaggctggatgctggtatgatgggaactgcccttttcacctgccagggagttcctaaagctgatcttcctggggttctgaaggttgcgacctaggttaatgagaccaaattctaggaaccactgcccaggccaaccaccgccagtgctgcagagatcaaagaaatccacagccacaggaaaaggagcttctttggacatgcccagctccaaactgtcccagggggaactggcacagcccttacatagcccaccccctcttggcctcaccgtggcctggaaattggccagagggtccacatcctgcccaaaccactctcctctcgtcccaaggcaaaggtgatgccctgaggcctagggctggataaagcccagctctggatgctgctaacccactctgctgccccaccccatcctccaatttttatactaggctctttgccattgtgacgtcccatgacatagtctgatgcacgataaaacaattatttctttatcttgca

SEQ ID NO: 950 - DNA, 12165 bp, Homo sapiens
  source 1..12165: mol_type = other DNA
cacaaagggcacttggccccagggctaggagagcgaggggagagcacagccacccgcctcggcggcccgggactcggctcgactcgccggagaatgcgcccgaggacgacggggcgccagagccgcggtgctttcaactggcgagcgcgaatgggggtgcactggagtaaggcagagtgatgcgggggggcaactcgcctggcaccgagatcgccgccgtgcccttccctggacccggcgtcgcccaggatggctgccccgagccatgggccgcggcggagctagcgcggagcgcccgaccctcgacccccgagtcccggagccggccccgcgcggggccacgcgtccctcgggcgctggttcctaaggaggacgacagcaccagcttctcctttctcccttcccttccctgccccgcactcctccccctgctcgctgttgttgtgtgtcagcacttggctggggacttcttgaacttgcagggagaataacttgcgcaccccactttgcgccggtgcctttgccccagcggagcctgcttcgccatctccgagccccaccgcccctccactcctcggccttgcccgacactgagacgctgttcccagcgtgaaaagagagactgcgcggccggcacccgggagaaggaggaggcaaagaaaaggaacggacattcggtccttgcgccaggtcctttgaccagagtttttccatgtggacgctctttcaatggacgtgtccccgcgtgcttcttagacggactgcggtctcctaaaggtagaggacgcgggccagggcccggggtgggtggtgggtgggagggggatttgggcagccactgcggtagagcccttccttacgtccaggccagaagtaaacagacccctctccagtccacgtgcaacggagccctgcaggggctcccacttccagctgccccgggcgaccgtaagcctcaccctcccggcccgcactcttccacccctctttcttcccctctccctggaatacttttggagctgttaacacttagatgaggtgttttatttatttatttatttatttttaatttttttaaaaacttttttgggtcaaagaaatccctttgagagggtagcccctgggtttcacccgttagctgagaacctgtccgctctgccatggtgatctccattcttcaagtgtttccgggagacttggtttctttgctcagagccgtgtcccatttaggaaagtactaggagtttggggttctccctacttgtttccagaaatgcgaggggtcagtactgaaggatcacttggtactgtgtttttaacagctgacacgtgcattaatagatattcaccatttacgtaatcccgggaagatacatgtgtatcttgactgcactgtggggatgcgggatggagctgcctttcgagacacccctgagggtaggggcctgggacacaagtcataagtggcttcagaagttgtggccttgagcttacagggtctggaagctataagggtgtgtgtgtgtgtgtgtgtgtgtgtgtgtgtgtgtcaggaagttctatacagtgcctctaaggaagtcacatgcaccatttatgtgtgtttatatgccagacagcgctcagcactccgcatttgggtttgtataggggacgcagggtgtcagatcaagcggtggttttcccaggttcccggcattggctgtcagcgctgtgtcacacacaaaaaagtgacagtcattggcgctggtttggttgggggggagggcaaatcccaaatctgatgtcagacgagctaagcgttggatgggagcgataaatcatctggttcaggaacttgggacccttcattatcccaaacgtttgagcttcggtcggtcttacctagactcgtgagtgtgccaagccaggagggcatcctggaggaggcacgccagccaaatgggagaccgggccgcgggggcgcgaggggggaggactgggcggggaactcgggtgactcacgtcggtcctgtccgcaggtcgaccatggtggccgggacccgctgtcttctagcgttgctgcttccccaggtcctcctgggcggcgcggctggcctcgttccggagctgggccgcaggaagttcgcggcggcgtcgtcgggccgcccctcatcccagccctctgacgaggtcctgagcgagttcgagttgcggctgctcagcatgttcggcctgaaacagagacccacccccagcagggacgccgtggtgcccccctacatgctagacctgtatcgcaggcactcaggtcagccgggctcacccgccccagaccaccggttggagagggcagccagccgagccaacactgtgcgcagcttccaccatgaaggtgaggcatggagcagggcgtgggggcggggagtcaccctgcaaagccctccaccgtgggcagactgcagccgtccctgtagaggcagcttggccggggcaccagcggacgtttccactcttgcttctgtactatcgtttctgaatctgattttaactcactgcttgtgtggtgggggagccagggattcccctttagtaactccgcaccctcttcctggcttgcagccagaagagctactcctcctggaagaattggagagaaatcaagtgatggggaagatgagggcaaaaggcatgcctctagtcagctaaacgtgcaagaattccacagagggaaaaggagaaaaagggaggcagattgagatttctttaagtctgtttggaagcttttgctctataaatctgccgcttaagccagggttttagggtagacagagccaagggcagagttttcagagatagtattgaaaaatcaaagcccagggccccaaagtctttctaatttatagttgatctgggcctggtttggaagattttgaatcccaatctaatccccgtgggagatcaatactacaatcaatcttattgtttccacaatgactttcttgtcctgtgcttaaatctgagataggctctgagtagagacaaggcaagccttcagataaaagcgtttgtagcagctgcctgtttttttttcatgtgcaccgaaatgtggatttttttttcttttatgatactacatgtggtttttctaaggtgggatatttctgcttgtttcatcagaagggcatttagtggactggaaatgtcttacagcagctattgaggtctgctgtacctaagttcttagagcaattagtcaaaaatatgttccacttcaattctttttctacacttttaaatgcttctttggcttaatacatttaaaatagagcatgggtttcttcaattcctagaaaagagtacaaaagtgtatatcacagagcaaccacttggcagatatttggggagttgggagtgaagttctctttcttgcctttccctgcttaggtggtaaatttcaagtgggaaatttacactgataatagactaatgggaaatggcacttccagatgttttctcccagtgtgaagggtgacttatacttgtgagagtatttgttggtaatgggaataagtcccaaaggcaagccacatagcagaagatacgttctcattgaggcagctacacattacgacggggacactgaattgatcatcagttcatttacaagcacatttctaagtgaggtgctctctgctagcagaaatcagatttgaaaggcagtaagatctcactccactctttcagaattcatccaatgaaagcagaaatcacctgttgtcatatgtaaaatttgtgtgtatgtgtacattctgccatcttaaccctgaaatgattatagatccagctaatcattcccaggtaatgctgattagaatacttttttttttgtataggaatgtaataagaacaactgttttagacacctcttctggaaatttagcatggaagctctcaactttatttttaaggcctggaagatgctgtgtctctgttacaacttaaaaggaagatcatttaagttagttaacacctaaaacattccattgtgtgaggattttatcagtgatgtctgcatattctcatcattcatctagaagtggtttgatcagaactaaacaggctacacgttattcaactgtgttattttaacttaaaaagcatgcttgagtttataaaatcagaatttatatctttgtgagtgtaaatgttacctgagaaacagtacagaagtgaccaacttgattaaaatcaacttgtaataacttcaggtcttaatgcagttagataatggagaaaagctatgtaattttgccccaaatttcaactaatccatttcttgtctcattatgactaatatatcatccttaatctggatggatatagcacttttttcaagactaatcattgttgtatacacccaggatttgcttttgataaacatccttgtgccatgcatgccacgaaaaaagtttttggtaaaccatgtgatgaaggttgctggctcaagaacagaatttagtttctacagcattaatgagcatttatttgaaaaaagaccataaagacccaatcataagaattacctgttgggttttctttgtaggtgtgatcgaatggtttggtggaattactcgacgagatatcatgatagcattctttcaaccaatatgagtataatgcgaccatatcataggggatctgagacagaattatcagttgtatttttcctattgaattttgtctagtcctttctccagtggcttttatttgggagaatatcagctttgctaaaatgttattgttttcaagatcattaaaaagtgcttcagctacatagacctttggaaactgccattgaacatagaaaagtcagttctgcaagtggaaagagtgttttgtgtattgctgtagttggaaacacattgaaactggttgacttcactggccctccaaaaagtctttatgcttttttgtcagatgggagagagaaagaccaggtgcttcttgttctcctcactctgaaggacacagtcttctttctacatgaaataactggattatttgcctctgtgactgaagctttcaaatagagattaaccctctttccacaaatataattattatgaaaatatccatataatagaaaagttcaagaaataactattgccctgcattagagactttgtggcacaaattcccccgtgcaaacaacagatttggacacatagatccaccaaaaccaatacttacctggtatggttccctagtggccccaggtatttcattgtcattacagaggccacattaagtaggaaaattactctatttggaaatggttgttgagattgaggctttggtgtccagtgatacttccttggcactgacattttccgttccacctgttttttagtggttcccctaaatttctcttaatccctttgcagtgaactattttgcgttcttagacttgctctttgtgtattttcactgagacaataagagaatatttcatcattccgaaggtgttggtgttaagggtgggcagaggccaaatcagggttgttgatgacaaccatgctctctattcctttatttgccattcccttgttgtattttttttaaaatggaatgtttttaaccttttgtatttgatattttttttctccttgatcagttgtctgttattttattatctggaaaatcttatattatactcagcctctttcattttgtgttagggcagtgacttccagccttactgattgccagcatatccccaggttttgttgttgttgttgttgttttactggagattttttagcccaaagtgtgttttaaaatcctcgaagcataacggtaacttacttttttgataaaacttaccatactttatttagaacaaaagggcagccacaaaatagcagtggctccttataaaatagacacattccagtgggccccgtcacttttctgctcatttctgtctgttctgtccatcatacctaagtcatatatttctgttcatttagttgggacagaactcacccaatgttatcattgtactaaatataaatgtgcccctaatggttttgacttttgcttaagtttttgagtcctcatgtatgttaggtagtgccatctagtagccagaaatttgggaactggctgggcatgatggctaatacctgtaatcccagcactttgggaggcttaggtgggtggatcacttgaggtcaggagttccagaccagcctggccaacatggtgaaaccacatctctactaaaatataaaaaaatagccaggtatgatggcccatgcctgtaatccgagctaattgggaggctgagatgggaggactgcttgaacctgggaggtggaggctgctgtgagccaagattgtgccactgcactccagcctgggcaacagagtgagaccctgtgtcacaaaaacaagaaacaaaacaaaacaaaagacaagaaacctgagaagcgcagtagattcaattatatatatctacttttaatttgctagctctgtgaccttaggaaagttacataacctctctgaactgcaactgtttcatttacaaaatggagataatgatagtttttctctaattggtttgttgtgagataattcatataaagctgatggtgccagattacactcaaaaaaagcattcagctgtcattatcattatgacttcttttgttaatgttatagcctttccttctctagggaaaaggaggccagagtggacctaggctgactgagagaattcagctcagtcttttgaattattttgaggtagaggaatgattgatatagtatagattattaaattaggacttcacttttggagaaaagttcagatatcattgttgtcttatttttcttcactttcccacatttttgcagccatagctccatccatttggttaagaacttagaagctcacaaactcgggtcaaagacaggtcgaaatcctcaaatcccttaagaacttcagcttattcaggaagggatatttacagaaaactagcaattgtataagtctccaaaaaagcatacattacttgaggatccatatatttttggcatcctcagggttgctgtgatgatttatagaaggtttgtttatttaatttactttatttcaaataggttttaatttttgtacccttaagaaaagattcgtactcttccctggcagattaaagaaaatgagcgtatattccctaaccttggccagttactttcctgggtttgagggtttctgtgaacgtctaacttacctctgtgacctgtttctgcaaccaggggtgttgcaatggatgcttttgtcttgaggatgggacctttcaagaaacagattcactgaggtgcagtgggaaggtcagagaaagatcttcgtatcgcctattattatttgctcgtctattttttctcctttcttaaggccactaactgattctcctttgctaaggctgcctacttccactgagaccttgaaccacatgaaattgttgttgtctgtgtttctggtcaaatagtggcaattttgtatgattcaatcttgtcatttaattttttgggaggttattattctatttcataccttttttatacccatcttctttacttcatttacctgtccctcatacttgacttgtagcttgtcccttcactgtcatcgtctggccatgtgggtgtgtacgtgtgtgcgagagagagaatgtgtgagaatgtatgtttctttatgcattgggatttagggtttttcttgcaattgtgatttctctgggcacttttgttaatatagctagtcagcgagtgctctagataattttccttgcctccccctctttgaaagaaaagagggtgttcttagatgtattcttatcagataagccagtagctcaggtgctggtctggctttggtgtcattggggtctgaggttgctgacttttaccttctctgctgaaaaattaccttcagcagaaacgtctgaattgcaaggagaaggagaaaaaaacaggccaaacacagtccttggtactccttgggagccactgagaagagtccaggttcaaatggtcagaaggttattttaatgattgtgtctggcctaaagtaccattagcttccagtggagtttagaatgtggatggatcctgaaaggtattccccagaggtttggattaataggcacaagggaaccctaaaggactctattggcctgatactccccatatccacgtagaagagctttagaagaaccttctgttctgagaccctggctgggcccacccagagctggcccattcaactcttactcctttgccaccactaatggttcttctactagtttttatattatttaacaaaaaggcactttaaaaatgcactcctggcaatctatactggaatatgaaaaacatgctgcaaaaccttgacactccaagtgtggtcttacagttcccagaatcccctccttgaggagctgctagaaatgctgaatctcaagcatctccccagacctactgaatcagagcctgcatctgaagctttacggtgtacaagctgttttatgtgaaggctgaagtttgaaaagcactgcattaaagcgttagtttggtataaactgccctgactgaacttggtgtgtccacttagcttgcatgatgactgttgctttgatgatgaaggcttacacgggtagatcctttgagtgagtgatctgacatgattctcctttgctaaggcatctagattcagtgcacaacttacagctgtttgtctttaggggaaatacaactgtaaaattaataaaaacatagtctcttcttatgataacatggaacgatggcaaaatagattttgttagcacttgggtaggaattctgaatgaagcaggcaaattctgttggcagtgaaatgataggatgtggtaaagttagaataaaataaacttaaatgtctcaaactctcatggtatatactaccagtttaataataatgttgtacctttgatgatttgcagactacaagcattcaaggtgctgtgttatatattacttgcttggagaataatacttcttaaaaattgaaattcagaaattttaaatcagacaaagcttttgtgcatggcccacttaaatggctattttgaaataatgatagtggatatagaaggattattctgtaataggatgagactgttccttttgtcatggagatcataatcatatttttgtaaatttttattatttttttggttttgtgtccatcctgcacactattactgggtaggtacatggttttttaacatggtttatctttcaaaactataaaggcattgcaaacagaagacaggtcatttatttttcttccaaaagcatctaaaatgagattttgatatttgaggtcataaagaggtgagagaacagacaacagttgggaaagctatttctcttgaaattgtttggccttaattactacagtgtcctagtaccacccatacgtttccaaagaagtagatccctgtaaatgcctttgtctctggacttttgagtaaaatagtagggtgtgctttgcaaaatgtcatcgttgatgttgagtttcagagtctttaattaggaagctgaaatctgtatatcgagatttgtaaatcatctaaattgcagagtaatgttttagaatactgcttaagggattggcattaaagccttttttaaaaaagaaatgcaataatttcctcaaatcctcactcattagacctctactaactatagtgctgacttttttttttttttaccctaaagtctggaattccaaagaaatgcttcaccatttcccccattattatagccacctggaagcagtattcatgtattagatcaaaaacacaacaaagaattatgaaaggttgtttcctggtatgcaatgcatgatgacatgaacttacagaacagagagaagggaggctccatgtttatttaaagaggaaatttttattttctggttacctacttttacatgggttacatcaaatcccacgatgaggtttaaaaattctcatagataatcaaacgtcattacttggcttactgaaattcagacttttcttttttcttccctgtttttctctatcaaattagaatctttggaagaactaccagaaacgagtgggaaaacaacccggagattcttctttaatttaagttctatccccacggaggagtttatcacctcagcagagcttcaggttttccgagaacagatgcaagatgctttaggaaacaatagcagtttccatcaccgaattaatatttatgaaatcataaaacctgcaacagccaactcgaaattccccgtgaccagacttttggacaccaggttggtgaatcagaatgcaagcaggtgggaaagttttgatgtcacccccgctgtgatgcggtggactgcacagggacacgccaaccatggattcgtggtggaagtggcccacttggaggagaaacaaggtgtctccaagagacatgttaggataagcaggtctttgcaccaagatgaacacagctggtcacagataaggccattgctagtaacttttggccatgatggaaaagggcatcctctccacaaaagagaaaaacgtcaagccaaacacaaacagcggaaacgccttaagtccagctgtaagagacaccctttgtacgtggacttcagtgacgtggggtggaatgactggattgtggctcccccggggtatcacgccttttactgccacggagaatgcccttttcctctggctgatcatctgaactccactaatcatgccattgttcagacgttggtcaactctgttaactctaagattcctaaggcatgctgtgtcccgacagaactcagtgctatctcgatgctgtaccttgacgagaatgaaaaggttgtattaaagaactatcaggacatggttgtggagggttgtgggtgtcgctagtacagcaaaattaaatacataaatatatatatatatatatattttagaaaaaagaaaaaaacaaacaaacaaaaaaaccccaccccagttgacactttaatatttcccaatgaagactttatttatggaatggaatggaaaaaaaaacagctattttgaaaatatatttatatctacgaaaagaagttgggaaaacaaatattttaatcagagaattattccttaaagatttaaaatgtatttagttgtacattttatatgggttcaaccccagcacatgaagtataatggtcagatttattttgtatttatttactattataaccactttttaggaaaaaaatagctaatttgtatttatatgtaatcaaaagaagtatcgggtttgtacataattttccaaaaattgtagttgttttcagttgtgtgtatttaagatgaaaagtctacatggaaggttactctggcaaagtgcttagcacgtttgcttttttgcagtgctactgttgagttcacaagttcaagtccagaaaaaaaaagtggataatccactctgctgactttcaagattattatattattcaattctcaggaatgttgcagagtgattgtccaatccatgagaatttacatccttattaggtggaatatttggataagaaccagacattgctgatctattatagaaactctcctcctgccccttaatttacagaaagaataaagcaggatccatagaaataattaggaaaacgatgaacctgcaggaaagtgaatgatggtttgttgttcttctttcctaaattagtgatcccttcaaaggggctgatctggccaaagtattcaataaaacgtaagatttcttcattattgatattgtggtcatatatatttaaaattgatatctcgtggccctcatcaagggttggaaatttatttgtgttttacctttacctcatctgagagctctttattctccaaagaacccagttttctaactttttgcccaacacgcagcaaaattatgcacatcgtgttttctgcccaccctctgttctctgacctatcagcttgcttttctttccaaggttgtgtgtttgaacacatttctccaaatgttaaacctatttcagataataaatatcaaatctctggcatttcattctataaagtc

SEQ ID NO: 951 - DNA, 32744 bp, Homo sapiens
  source 1..32744: mol_type = other DNA
gcgcggcgggagcgcgcttggcgcgtgcgtacgcgacggcggttggcggcgcgcgggcagcgtgaagcgaggcgaggcaaggcttttcggacccacggagcgacagagcgagcggcccctacggccgtcggcggcccggcggcccgagatgttatctgggaagaaggcggcagccgcggcggcggcggctgcagcggcagcaaccgggacggaggctggccctgggacagcaggcggctccgagaacgggtctgaggtggccgcgcagcccgcgggcctgtcgggcccagccgaggtcgggccgggggcggtgggggagcgcacaccccgcaagaaagagcctccgcgggcctcgccccccgggggcctggcggaaccgccggggtccgcagggcctcaggccggccctactgtcgtgcctgggtctgcgacccccatggaaactggaatagcagagactccggaggggcgtcggaccagccggcgcaagcgggcgaaggtaaggctcgacccttccctcaaacgacaccgcctggtgccgagcttccccgaggcttctccgccctcccccgccgccgccgggtcttgggccctgcgaccactcagacctccccttgtatcgctgcgcacgccacgtcccctctagctggacgggtggggtgagaaaggaaaagtctttgccggtgttgactgcggtctttgtgctgggtcccgagcgacgtgggaaggggcatcgatgattgctgggaggggtattttattccttaggtctttcttgcacaccttttcattttcttgactggaaaatggctccctgacgtggggttacggttggcgttcttggagacctcacttgtttgttcacagataggtctggaagctgttgggcgatattgatggcgtttcagctgggtgcacgagggggctgtaggttgatgctgaagaaatcgccttagccggggagatgaaaagaaagggtcgtttttgcttttgtttttgtttgagcaaaaccctgctgtgtggtaggagttctagtctttttttttttcttttttaaaatcctctcagcgatcttttggcgcagaattttgcagatgaggaagctgctgattgagagagcaaataatagtcaaaatgcaaatatatgggaagaaaagatttgactccaaacagtatatacagacagtgactgcctcaaatgtctgtgtcctagatgctatattcagcgtgtcaccaacattacttttttttgttgttgttaaatatcaacgggcaggtattgctagccctattttaggaatgagtaaactgaggcacacaatttaagcaacttgcctaaagtcacaaagctaaataagtgatggaagtggaatgtaattcccacattcatgttgttacagggtatcatcagcccttgaaacaaaggaccacatgggacactgtgtgcagggcactggggcagtattagggcgcagactttagacttgggccttttctggagatttaatggtcggtctagttggaaaaaacaacctggatatatatgtgcgtgtagtcaacatttaaataaaaatttgcagattatataatttatgcctgaaaaaattgtctacataatttttaagtgggaataccaagtcagtgtgtatggggagcttcttgagatgagtattacccagtctgagagctctcatatttatctgcctacttgagccaactctctaaagtataaccagtgctggatgaaagaccgttttggaggcaagactttctggagcttttaccaaagcatgggttagaaaagcacagaggttggtgacaccagccctcagaaatgaaataaagggcagaagtcaagagtgttattttacgatttcaatagacaggtggccagaagccacgtataagatgtttttaaaaacagatttattggctgggcacagtggctcactcctgtaatccctgcactttgggaggccaaggcgggtggatcacctgtggtcaggagttcgagaccagcctggccaacatgatgaaacccccgtctctactaaaaatacaaaaaattagccgggcgtggtggcgggcgcctgtaatcccagctactccggaggctgagttagggagaattgcttgaacccgggaggcagaggttgcagtgagcccagatcgtgccactgcacttcagcctgggcaacaagagcgaaactgtctaaaagcaaacaaaaaaacaggcttattgggataatgcatgtataataatattcaccattttaaaatgtatgattcagtggtttttagcatatttacaagattgtacagccaacaccacaattgattttagaaccttttcatcatccccaaagacatctgtatcattagcagtcactccccagtcctccctacccccagtccctggcaaccactaatctactctttgtctatggatttgtctattctgaacattttatataaaatcttatgtagccttttgtatttggctttagcatgttttcagggttcattcacgttgtagtgctttcattcagtacttgataactctttatggctgaataatattccattgtatggatataccaaatttggtttacccattcatcatttgacgcacattggggtttgtttccaagtcttggctattttacataatgctgctgtgaacattaatgtacagtttattttgtgaatatgttttcagttctctttgggtgtgggcctaggaattcctgggttttatgttaattctaggttttacttttgaggtatagccaaacagtttcccatagcagctgcaccattttacattcccattagtaaatatatgagggttccagtttctccaatgttcttcttcgtttttttttttttgttgttgttgtttttgagatggggtttcgcttttgttgcccaggctggagtgcagtggcatgacctcggctcactgcaacatccgcctccaaggttcaagtgattctcctgcctcagcctcccgagtagctgggattataggcatgcaccaccatgcccggctaactttgtattgtgtttttagtagagatggggtttctccatgttggtcaggctgtttcaaactcctgacctcaaggtgatctgcccacctcggcctcccaaagtgctgggattacaggcatgagccactgcgcctggccttcttcttcttttttttttttttttttttttttgctgagacagtctctctctgtcaccacccaggctggagtgcagtgatgtgatctcggcttactacagcctcctcctcctgggttcaagcgattctcctgccttagccagccgagtagctgggattacaggcacctgccaccacctctggccagtttttgtatttttagtagagacagggtttcaccatgttggccaggatggtcttaaactcctggcctcaagccatccacccacatcggcctcccaaagtgctgggattacaggtggagccaccttgttgagcctccatatccttcttgacatttaatattgtttgtcttttactgtagccatcctattgggggtaaagtggtatctcattgtggttttgatatgcagttccctaatgactaatgatgttgggcatcttttcatgtgtttattagccatttttatatttttgttgaaatgactattcaaatccttggctcatttttaaaaattgagttgtcttcatcattttctagtaagagttctttacatattctggttacggaaatttgtgattttgatgagatccaatttattcttttgctccctttacttctggtgttatatctaataaaccattgccttatccaatgtcacgaggatttactcctatgttttcttctaagagttttttagttttagctcttgcatttatgtcgatgatcttttctcagttaatttttgtatatggtgtgaggtaggggttcagtttcattattttgcatgttgtcccagcacagtttattgaagactattctttctctcagcgaatagttggcaccctcattgattaactataaatctaagagtttatttctggactctcaactctattccattgatctattatatatttccgtccattccagtaccacactatcctgattactttagtttcataataaattttgaaattaggaagtgttcctcaactttgttcttcttttgcaagattattttggctgttctgaatgctttgcatttccatatgaattttaggaccagcttgtcagtttctgcaaaaagggctgctgggattctgattgtgattgtgttgaatctgcagattgtaagtttggggcacactattagattttactgttattttttaagctatctcctacaagaaagatttctttttttagctaactgattaattttttggaggcaggttctcactctgtcacccatgctggagtgcagtggctcaatcatagctcactgcagcctcaacctcccaggctcaagtgatgctcttatctcagcctcctgagtagctgggactacagctgtacacaaccatgcctggctaattttttattttttgtagaaatggcttctccctgtgttgccccagctggcctcgaacttctgggctcaatcattcctcctgcctcagcctcccaaagggctgagattacagacatgagccacctcacccaaccaagatttttttctttgtaattctcctgtgtttattttaactcatcttacttaccctgttttttaatcccccattgtaattagctcttaaactttcaggaaaaaaattagttatgtgtttgtttggggcagcaactactaggaagctagcaactatccagtcttgggatccagaggaaacagactttagaggatagagtatccatttaaggaataaaaagcaagctgaggccagtatagataggccatgcttcagtagttcttcagtgtatgcaaggaaaaaagtgcatgtattttatgacttgggagcttatccagttttgaggactgtactttaacaaaattatatcattacataattaaaattatgtttagggtattggaaggagttcatgtaattgagtgtccctgaagcttcagtttcattagtttcagaataaattcacttttgggcatgtgtatgctaaaattatggcaaaatatttaaggttttaaattggtaaattgggttggaacttcacgaacaccatactcctttaggaatggtggccttgagctaggccatgaaatggcagaatttagaaaagtgttctggaaaagggtggactttttggagtttaagtatttcatcttcctctgattcattttcctcaggtaaataagccctaccttgtaaagtttagatataatataaacaaaatgcttattgcagtgtttggcgtataattagtaggtgaccagtaattaagatactaccagtggagaaaaggaagtggtttgagaagcatcagggaatccagagtggacaactgaatgttgagaacaatggacaaatgaatttaattagaaacaggaatcatctaggaacaagatagattgaagggaccagtagcgttggggttgtagagttgtgtccaggttgtagtgagcattagattcttgctgtccaatatggtagcctgtagccacatgtggctattaagtttaaattgaaattaaaaacagtttcttcagtcacattagctacattataagtgctcaatatagcacatgttgaagccacagaattggaagcacagatagagaagttttccattatgacaaaaagttctatcagacagccttgaactagattatgaagtgcagaccataagtgctgtgagacttcagagaagatgaaagattttttttttttttttttgagatgaagtctcactcttttccctcaggctggagtgcaatggtgtgatcttggctcattgcaacctccacctcccgggttcaagcaattcttctgcctcagccctcagagtagctgggattacaggcacctgccaccacgcccagctaatttttgtattttcagcagagacgggtttcaccatgttggtaaggctggtctagaactccttacctcaggtgatccacccacctcggcctcccaaagtgctgggattacaggcatgagccactgcacctggcaggtgtattttttaaatttagaataattaagaaataatcttcagaggaggtggaccttgaatatatggcattggattaacagaaaaagatggaagtagctttagggaacttagaggttggtagagcagcattgaggacttttttactcgtgtgttagtgattagaattaagtttgaattcaggccagacatggtggttcatgcccgtaatcccagcactttgggaggccaaggtggacagatcgattgagcccaggagtttgatatcagccttggcaacacggcaaaaccctgtttatacaaaattataaaaattagccatgtgtggtggcatgcgcctgtagtcctagctactcaggaggctgaggcaggggaatcacttgagcctgggaggcagaggttgcagtgagctgagatcacgccactgctttccagccttggcgacagtgagaccctgtcttaaaaaaataaaaataaaaataaaaaaggcagtttgaatagtcaaggccagagagtgtatatgctggtttgaaaaatttgacgttcatatctgttaagctattagaaaatatcacataatgggaaaattaatctggcagctttgccgtagataaaagggagaaagtttttttttaatttttattttttgtggtacatagtaggtatatatatttatggggtacatgagatgttatgatataggaatgcaacgtgaaaggaaaaagttttgtttttttgtgtgtttttgttttttgtttgtctgtttgtttttttttttttgaggcagtgtctcactttgtcacccaggctggagtgcagtggcccgatcatggctcactgcagccttgacctccccggttcaagtggtcctcctgccgtagcccccccaagtagctggaactacagatgtgcaccaccacccacagctaatttttgtagagatggagtctcgctattttgcccaggctggtctcaaactccttagatcaagtgatctgctcacctcaacctcccaaagtgctaggattacaggtgtgagccaccatgccccgcccaagaaatatttctttataaagactgatgctttaaggacattgaggagtgaatgaatcattgtaataagggtggggaggagaaggaagagactaaagatttaaatttcagagtcatcaatgtgaaagtaagaataattaccctactcactcatagtctgcctgttgggacatctttatgtccttggttgtaagtagttgtagaatctctgaagtctttggggtttttacttagggatgagagagtcccaatcctttaggttcaaagtacacattccttttctcaggggaatagtttttattgaagtttgtatgattctttcagatggttttaaaactttattaaatggtcacttcttggctctgggcaattttaaaattatctaaaaaaaaaaactttattaaatgaggaaagccttttttataaaataaaattttaagcaaaaatcccaaaataaaacacactactattaagtagtattaagaagttaaaatttataacatttattttagttgtcagtctatgagaaaatgaggtgaagccaaatttgagattggaaattaagcatgatagtcttcttttagccttagaatccatttttttcccccagcgactagaccaccagggaagaatccaattttgtttctgtattttgctttgtttatgaagtattgtggcagtctggtactgatttgacaaattgtgcaaaaggtagaaggttggttttgtttgcttttttttttttttttttgagacagggtctcgactctgtcacgcaggctggagtgcagtgtttagatcacagctcactgtagccttgacccccccccgcccccaccaggttcaagtgatccacctcagcctccttagtagctggaactgcaggtgcatgccaccacaccaggctaagttgttttatttttttgtaaacacagggtttccctgtgttgcctaggctggtctagaagtgggctcaaatgatcctacactttcttccttccaaagtactgagattacaggcttgagccaccgctcccagccttttttttttttttttaagcttgctttgtcatctcaggatgctctcagttgaacagacatggcagaagaaacttcattctgaagtctaccccaaattgagttacccaagcagcacaagttaattgtgttggttgtctctaaaggattaagatttgttttaacacatgaatgtgtaatacatttaaaaaattaaaattctaaatcttgaagaatcctagggttctgtgaaacagttttgtttttaataataccatcagatattattgcttctacctgtaggtatttttctcatctcttttgttcctaaagactaagaaccctttctagaccacccttttccaagtgtattccttgttaattatttctttgtcaaggcattggattaaacaatgttgaaaagattgtttttgatgcaaaacttagcagtacctttattttctatttttttgagacagggtctgtctctgttgctcaggctggagcacagtggtgcgatcacagattgcacccttggcctcctgggcataagcggtcctcctgccttggcatctgcctgcctcagcctcccaaagtgctgggattacaggcatgagccaccacgcccagccttctcagtacctttaatgtgaattatgactttcctagagggggcctgtaaagattgcagtttcccagacttgatattggatactttactccttcaaagggcatagtatccaatggaacatcctttgggaaaaactgaactacaatagaaaagattttgtattagtctttgtttttgtctcaaaatttgcacattgtccagttccatattaggtacttaagtcattattgaatgaataggattgatggggcagaggatcaaaggactgaatctttggggaagagtcaagcactattgaggggtaaaaggagaaagaaaactgcatactataaaagtttatggtctattctgacttctctccccctttgaaacttttttttttctccttgctgcattttcatccattatcctgagacctatttccacagtttatctcagtcagttaggataaagtttagtataatatcatctacatttctggagtcttattgcaaagaccctgtatgagatggtcacctgatcaggatcatttaattgcaactagattttcagctttttaggggcagggacacagtcataattgttttctccattgtaccacgtactcagtgttcagtatttgagtaggtgaatacaattattcatgtattaaataagattcttagagcatgggtcagaactagtcagttcattcttcttaatttgtgtttccattttctaacccaatccctgttttcagtaacactcttgtacttccagcaaccagtcccccgcccccaaatcctgtggtcctatcatttaaaaaaaagagcaaaaagacagtataaaaacagctggccatctaaagctatatcaaagacatttagcaagttaaaatgtattacattcactataatccacaggactattcatcttggaaatgtaaaacattagatatttgtggaaaccatgttgtctttgctttttttccacatctaataaattatcttttcatggaattaataataattagaattttttaattgattccataataattagctgtagtttcttttattaggaagtcacaatgatgatttgagaatgttccaattttgaagactatctgtaataccgtattacacattttggctaaccaatccataataatcttccctgtcttacactcctttaccctcaatgacacattcactaagactgcttcctctttttgctaatgacatacctccctctcctttatagccagtgtgaattagtagtaagacctgtatcctccatttccacgtcacttattccttaatttatcttatttttatttttattttttttgagatggagtctcactctgttgcccaggctgcagtgcagtggtgcgatcttggctcactgcaacctccgcctcccaggttcaagcgattctcctgcctcagcctcccgagtagctgggattacaggtgcctgccaacacacccagctaatttttgtatttttagtagagaagggttttcaccatgttagctaggttggtctcgaactcctgaccttaggtgatcctcctgcctcagccccccagagtgctgggattataggcgtgagccactgcacctggcctctcctaagtgaatttttaaagcaaatgcaccttttcatagtttcagtttgactgttgttattttccactccatgccctccatttggtttttggaatttttttgctattttcccctggagtagtagttagaagcacagacttggctttagacagacttggtattctagttaactatatttttgtctgagggtcattttattcttttgttggaaattccagtatgtgagcatgatacacacaattaaaaaggtttttgaggagttgtagagagccttagagtcaatgatttgaatgtcagtgctatgatgtaaaacttacagattagtttgaacctgaactgacacaagattgtttcatgagggctttgtttttaataactacctattatgagctgccttgttccttgttgtatgcttacttcccttaaaatgtgaggttaacaatttacattgactgatggttccaaatagagtccctaattttaaatgttcactgcatttagctttccctggtatgatctccatataggtagagtacagagagatggatgaaagcttggccaacctctcagaagatgagtattattcagaagaagagagaaatgccaaagcagagaaggaaaagaagcttcccccaccaccccctcaagccccacctgaggaagaaaatgaaagtgagcctgaagaaccatcgggtgagttgtagtatccaaccacagttctgttttatcttagaaataagaatgaatggatttatttccattttgcaatattatttatgtctttatctttggtttataataaagtctgatattgagtctcctgccatgtgtgtctttgtgtgtgtgtatacatatacatgtatatgtgtgtatgtatacacatagatacgtacatactggtactgatactctttttgtgtgtctgtacatatacaggaggaaagtaaagggtgggaatggaaggacagtggcaatataaggtggttggaaagtaggagaaaataaatgattagaaaaaacatacagaaagccatatccaaagcaccagacctctcaatgacagttctgattcagaaattgttctggctaaatgatgtgtttaccacgtagttagatactttctgataaaacttccacggtgtggatcggttttgagaagtgccttttcctggtgaacaaatgtaaaaatatatataggccagaaaatctagaaagattatgggagtctatagttttggtttcagagcttcaaacagctttaaagaattctcactaacatcccctcaatgctgagtactagctttctgaggatggctggaccaatcagggatatctgcctttctgttttggagagaccaagcaaaagcagtattttaatgaatttttgtatcttgtgcccttaatgacattttatttactctttttgactttgaatttttactaagttcctcttcttgaaataatttttatgtttcgaatagcttcagacccacacacctctctggttcttttagtcctgtaccttttaaaaacaaaatggtggtttcagaccccatctgctatatcttgcatgactttcgtaggtacccagattaagacatacttcatttgagatgttttatcttttgttttagccttttttttttaagggttttctcccctatggtgttactgtgaattaccagaagcagtactgatgcttcactttagggcattaccagtcaagtgttaacttaggtttggagcttatcaaagtctggctaaaacttaaaaatcaaatttataatttataggattgtaataaagtgtactaaaggaatacagtttgagaacattcagaaaaagattctggtttcagttcattcaaaagtcagggattttctaagaagagtggttttcctaaaactttcttaaaatgatttcttgggcaactccttgtttgaaggtttctagtttcagtagtatattacctttggggctaatgtcccaggcaaatgtagctgcctttttactttacacctctcgttattcatttttcttcttcctctttctagtcttatacatttagctctcttccttctgttcttacctccaacctttcccttcaccctgtgctcttttcttctgtgttctttttggttcttacctttcttctacctttgctgtagacctgctaatgagatacttggggataacccttttaatgtctgcggtggctcaagagtgggctgacttcttagttcaagggctctaagtactacgcattgatgatctgatatctcagatgctgcctcaccttttttgtgtggttgtgtctccagtaaataattgatttaccataggttccaagttgataaacgtttctttgaaaattttaaaccatgtgttggtgttgctgtttgcttttttctgaaagcttttttttttttttaatttcataaacgtcaggtattgttcccacaaaaagtaaacgtcttagcaaaaggatttaggatttgggagctgtctttattgtgttgtagttaattataatgcagtggtttagtttaagttatctttgtttttggggggacgttaaaattttaagttgaggatatcttcaatgcttagaaatgtgctgataacagccagaacttactaatatattatttgtggttatgaaaatagtgattcttcctttaaaacaacttaatgttttttttgaaaatttctggggtgaattagggatgtactttccctagaaaaaagtgtcaacttactagcctaaactacttatgtagtttagcaatagattggaccctgatggtgaatcataaaatattatcaggtgagttaaatatttggacactgtgcagggtttctaagtcttttgtctttcacaagagtttttagtcaaaaattgaacggaagcattgctatatgactatattaaaagcttgagagaagatataggtttgtttcgttttgatatttttggagacggagtctcgctctgtcgcccaggctggagtgcagtggcatgatctcggctcactgcaacccctgcctcccgggttaagcaattctcctgcctcagccccctgagtagctgattacagatgtgcgtcaccacgcccagctaatttttgcatttttagtagagacagggtttcaccatgttggcccaccttggcctcccaaagtgctgggattacaggcatgagccaccatgcctggcctgtgggtttgtttctctaccaaaccttttcttgttctcagtctttttaaaaggcaatcactagaaattattctgtcaaaaaatataggttagggccaggcgcggtggctcccagcactttgagaggctgaggcaagcggatcacctgaggtcaggagttcgagaccagcatggccaacatagtgaaactctgtctctactaaaaatagaaaaattagccaggtgtagtggcacgtgcctgtaatcccagctacttgggaggctgaggcaggagaattgcttgaacccgggaggcagaggttgcagtgatctgagattgtgccactgcactccagtctttgtgagagcaagactccgccttaaaaaaaaatccaaaaaacaaaacaaaacaaaaaagtaaggtttgcatacatttcattcttaccaacttttaaatttgtttagaaatttttgctttgctttctgcagtgtgttaatcttaacaggaagtaaatattttgttaattatgaaagcacaaggtattctgaagtcagtgggtcaaattgactgaataaggttcctctgggagagtactgagaggaagccagaatggtgggagccatattgtgaatagccttggttgactaagccaggctaaggaatttgagcattaggagtgtcagcggtagccctgaggttttttgagcaaggggggttacactgaaatatgtttttggaaagaccaatctcatgctaagcgtgaactaaaggagtaaagaagctgagattggagagataatttaggctattggtcaatggaaaaatgttcttaatatcaaagttgaatttttatggaaagaaaaagtttgggtgtttttgtctgattgcacttatataattggaaggaagttctctctgttgacctaaatattgtttttagatttatcaatttttgaccgtaagttaatgtgatattgtagtcctatggtagtcaaaatgggtaaataatggatttttcataccaaatattactgtttatatttaaaaactacctcattttgttttcctaaatatttccatgcatttttatacttactatacttttgaatatatttgttttaacacatgatggttttatttggtttcctagtaccttttctgtgaagatgaaagtttttttaggtcatgccaactaaacttgacaggttgtctttggaattgagtgtgtttggttactagcagcgtcacataatagtggagcgtttatgaaatagagtcaaatctccttcagttggacttcattgatttagaataattgtcccccagtaaagtacccttctgtttattggagaaatgcctttcctgtctttgctcagattgttaccctgtgtaccttacattattttcctcaatgagttttgcattcctgtattaactgattctccaacacttacttggcttttttattttcacatggaaacatgactccattttttttttccctccactgcctttcagcagtcaaattttaccagaaaaatcttactagttagttcctggatttaaattgtgtattgggtaacttttcactagagaactcaagatacattctgagttagaagtagcttagttgtacatagcctgagactttcatggaaagttattctaaaataagtaaaaggaaatttgaaatgggttattaagatgcctttcttaagcctttttcaagttaatggatttttcagtagagacatcagaagtgtgtgtgtatatgcatgtgagtgtgtgtatcatttttctaggctccttgatgtcctagtccttaagactaatgaagcccagaagcttccattaagtcattggttaactcttcaaatagatttttttagatgtgattggtaacaagtctgtattataatttattttatggaatgaccatgggaagaatcactttatctccttgtttatattcttatttgtaccagaggaagccctcttctctattatatgtggtaattttaaaagtttgtaggtgtgtgttttaaagagatgtaggctgtttttgtttgtttgtttgttttgagacggagttttgctcttggtgcctagtctggagtgcaatggcatgatctcggctcaccacaacctccgcctcccgggttcaagcaattctcctgccttagtctctcaagtagctgggattacaggcatgcgccactactcctagctaattttgtatttttagtagagatgaggtttctccgcgttggccaggctgatctcgaactcctgacctcaggtgatccacctgcctcagcctcccaaagtgctgggattacaggtgtgagccaccatgcccggtcaggctgttagataaattaacaaaaatcattgatgtgagagaatggtaagataagaaattttgtgtggttttaataaatttgggggcttgttcacataataatcatactgtaggttgaaaatattttttaaatttacctaaaaggtgatgttaacctgaattagtaaaaatactaaattacagaaaatacacaatgtatgagtagaagaatttaaagagtcaatgaaatttgatcacaaatgctgttataatgaaaatttcatataacaaaagattgaggaccaaaaatttgatgaattatttagtagagaaagtattaaaaggcagaatcttctagagtattctatagaacttggtataatagaatttgatcagaaaagagttgaagattgtcttactttaaaagaaaaaaaataagtggtactaatattttcaccttatattagggtagttctttgtttataagataccctgatctcttccctgtgaggcagtcatactgagtgcagtctggtggttgccaagcactgagtttggcagcatagatagtaatggccagagttcaggtgaaccactttgtttttttttaatcatgctgtaactattctcaagtggctaatcccaggcttttctctctgatttctctctccatgcctgcaaatggagccagagagaaggactagctttcaggtttagtgaggattgactcagattaccaccacagggaagatgataggattctattacatccccaggcccagcaggagaccctgttttgtaggtttaccagaagtgactagggagttcattcctgacggggttgtctgtgttgtcattttgacatgctagtgtaaaataaatgcctgaaatcatttgaattctcattttatgaagtatgatgcatacattcagaaaataggcatagggttagttttcttgccacgccccccccctcccccgccccctcaccactccagcctttttggaacacatttcggtgttctgatttggacctatgctccaaaataccttactggagggctgagggaagaaagtgacaagctgaaaaggtaattcaacagaattcttatgttcttatattttgaggcattatgaatggatcaagataaatacgctatacaacacacggtccccactctcagataatttatagcctagtatgagacacaagtgtagacataaatgcataatggaaagcaaaaaactcttaagtgtgatatcaatataaaaattctagaggcatatagaggtaggaagggtgaagagtagagaattggtagtatggagggcaaattttttaaaaaataggcattttctacaaaaaaataagattcccccaaatgtagtagttcctcattgactttattctacaaatattattgtacgatgataattattttgtcacagtcacagtgctggattctaagggttcaaagagaaagagtacatccacctgcaaagaatttgtagtccagtggcctggtgtggtgcatgcctgtaatcccagcacttagggaggccgaggcaaggggatcacttgaggccaggagtttgagaccagcccagccaacatggtgaaaccccatctccactaaaaaaaatatatatacacacacacacacacacacacaaattagccgggagtggtggcttatgtctgtaatctcagctactcaggaggctgaggtaccagaatcacttgaaccggagaggcagaggttgcagtgagctgggatcgtaccactgcactccagcctgggtgatagagtgagaccctgtctcaaaaaaaaaaaaaaaaaaagtgcaattcagtttagggttacagatgttagtaagtagctacaatgaagaaactacaatagaaatgtatagaaagtatggtgagaactcagaagtttttatttttttaattgataaataagattgtatttatcatgtacagcgtgatgttttgaagtataaatacattgcagaatgaccaaatttagctgataaacatgcattacctcacatggttatcatttttgtggtgagaacacttacccactttcttggtatttttcaagaatacaatgtattgtgattaacaatagtcaccatgttgtataatagctctctcagaagctgtttttaaataatgtttctccctaaaattgggttttggaaattttgtgttaaacatgaaaggatgaagcagttttagatccttgatttttaactatttactgcttttggtcgataagaacccttgaatcagatgctacaagtttatgtttggtctttgagagattgacctgcttttcttaatgatgtcatttcattgatttgttgtactttttattaaggcaaaatagtaatttgtttagctgatcacctttatttttataatttatttgaattctttttgttgccatcatttattgggtctgatcatgttgtaatagaagaacaagatttgtaaggattttctcgtctacaaaatgagacttgttatgagaatcaaatgagaaaatgcgaaacccacctttatgtataaacatcttgtatttattaagcagagttgattgaacaaagaatagggtggattggtgttttatttaggaaaaaaatcagggcagctttagaccagacagacacacatactgtgttactttgggaaagtgtttgtggtgggccattttcagtaatgagtcgattatgaaatagataactttttaagcatctggaactgtttgtgtgtgtgtgtgtgtgtgtgtgtgtgtgtgtgtgtaaaacttaaatcttgataataatcttttaagttaaatcatgagaatgacagactttgggactttctaacatagtttttttttctttccttaagagaataatataattgaaattcttgcatcggctgttgagttataagaaatgttttgtaagctttgttattaaccagacacaccttaagcttggtagttggacacataacatctgaattgtaagctttctctggaacattttgaaaagtgaacacaaaccaagactgcagcaaaataagtaaggatcaggaaaatttctactatggaatgtggagggaaataatatgtgaaaaagtaaattctttccattggcttctaaagctttgcatttctccctagcttgtagggccttttactttcttttgataagatccttgctactacccagtggaagtcttcaagcacatatctgtggtgttattgttctttcagcagttcagtggaagttccaggcaagctcctgcttcaagcaaaacaatttttctttttttctaaaccttaagaaggctgttttacttcagtattttacatgatactgtaacccagggattgctattctagttggaactcataatttcattttgactgttgctcaggctggtcttgaactccttgttgtaagtgatcctcctgacttggtctctcccaaagtgctgggattacaggtgtgagccactgtcaattcctttttgaaactgtgactttccttatgttcatgagattaatcatgcatttatgactgcttcaaattatctgagcctattattacttccatgctattttgaagtcttttagccccattcttacttctgagttctattgtttaatttccaaccatctttagaacatttccatttaattgtattagccagtctcccaaatttcccattttgtttgtagcattactagtcttctgaacttaaaaccctagagtcatcctgaaagttctttatcccttttaccaagtctgttgtaaagtcatgcatcttactgtgcagtctttttcattttttaggccttacccatttttactgtcacctttttctagtgaatttcaacttgtatgtaaattatttcaatagcctttgaattggatctcctttatctaggttttccctctaatccatctcgtacaaagtggccagattagtttaactaaaatagcatttgttttgttgtctttgtgccaaagatcacacacttttccttcattactactaaaatcacgttcaggtttgggtactggaaagggatcattttaccaatccacttgatctcccactgctttttcagaccatctccttctgaaagtaggtaccgagcagtcctctgcacataccatgtctgtgcttttctctttatctttgtaaatgatctggaccatagtcgtggtttcactgcctcgcagtctatccagatctctcgggaattgttctgaaagcttccctgattctccaagactgtgtcagcttctcgtttcttaacaacaaaagtttccttgtaggtatttttcatcttttctcaactagattataagctttttgaaaacagagagtctacctgttctacttttgtatttgtgctttgcagttttggggcagatacggtaaacactgattattaaataagaaactcaattagtgcgttaatacggtagagacatatattccaagttggctttaacttttgaaatgtttctttcacctgctaatttattaaattcaattgaaatcagtaggttggccttcacttttattccataaatttggccattttggtaaatttatcttctattggaaaatcgttgcttcctagatttagaagtttcttaaaatgtttgtaatttgaatgtgattccaagaaactagtcaaaatgtgaatctgtgtttctggaaacaaccaaccagtgattttcacctccttgtttgtttgccagataaaagcatttgaaagtcaacatagacttccttttaagatgttggaagagtgatctcttgagtatttgaattcagatgagaaaacattcagtaatgtgattataactacaacacttcacgcttcaagaaggactcttagatctgaaggtctagaagacaactgaaaggctgttatgtaagataaatcaaaaagatcttcattttcaatttggagtagctgtgtacaaataagctgtatgaagagtctctactttaggccgattgtggtggctcacgctcataatcctgttgctttgagaggctgaagtgggaggctaggagttcaaaaacagcctgggcaacatatcgagaactcgtctctacaaaaaaaaaaaaaaaattagccaggtatggtggtacatgcctgtagtcctagctactcaggaggctgaggcaagaggatcccttgagctcaggagttcaaggttacagtgaactgtgattgcaccactgtactccaccctgggcgacagagcaagaccttgtctctaaaaataattaaaaaattaaaaagagtctctgcttcaagcttgaggactattttgtaggtttggtggtttgggataaaaacaaaagggagtttcttgtgtagtggtgccaaaatcaaggtgatattacaaagttgcttttgaatattttcattttctgttttgaatttgcactcatggaaagctaacagcgctacttgcctgctgttaatgtgtcctgagccactatcagaaacagagtcctaggctggaaagacccaaagagcagatgaataagggattttatatatatcataatcagagactacttggatgaaaagttagctgcaagcagtgttgtgtatgtgctgtttttaagaaaatgttcaagaattggtctataatatactgctagtaaagatgatctttcagttgtctttggagaagtaggcatcttcaaaatactctcaagtatgattggagtgaaaataataacttcattctttatttccaagcaagttaaaccattatcaagagataaataacttgtttcttaatttaattttaagcacttttaaattttgttttccatcatttcttatgtggtaccttctgcttggtttctttctactcctctgcttaaataatacttttgagtttcttttcttgcttttttttttttttttttttttttggagaccgagtcttgctgtgttgcccaggctggagtgcagtggtgcaatctcggctcactgcaacctccacctcccgagttcaagcgattctcctgcctcagcctcctgagtagctgggattacaggtgcataccatagcgcctggctaatttttgtatttttagtagagacagcgtttcaccatgttggtcaggctggtcttgaactcctgacctcgtgatccgcccacctcggcctcccaaagtgctgggattacaggcgtgagccactgtgcccagcctggagtttcatttcttttttgacattttgttgttatgggatcccttttaaaaatctttgcagggtattgaatattttctacattttcctgcatttttttaaattaaaaaaaatctttttaagaggttttttaattcctttcttcaaaaccagaagacaaaaaagactgcctcgttgcccttttgtcctggttaacctattgagtacgcaagtcaggggtaagaaatccatctttttttgtgaatcaaagcaccattgattcacacacaaaaatcagtcaagagctacctgtagcttaaattagtgagtttattgtatgacatgtattatagttggaaaagaagggaaatgagaggaataggaaagataaagtaattcaggcttaggctagcttcaaagtgtgtgttttttgttttgtcggttttttgctgtttttatctaagtttttagtggtgagataccttcatgacaagagactgtcacttttatttttgccaagtcagaaacataatttgaacgataacagctgtattattcctaatcttaagtgtgattcttggaaactatttgtttcattgttctgagtccctccctgctccctttcttgcccaaataaaattcagttttctgatccagcttggttttatttggaaccaaacgaaacaatggcaacattttttaaaaatctatgaaatatattattttttttttttttttttttttttttttttgagacggagtctcgctctgtcgcccaggctggagtgcagtggcgggatctcggctcactgcaagctccgcctcccgggttcacgccattctcctgcctcagcctccgaagtagctgggactacaggcgcccgccactactcccggctaattttttgtatttttagtagagacggggtttcaccgttttagccgggatggtctcgatctcctgacctcgtgatccgcccgcctcggcctcccaaagtgctgggattacaggcgtgagccaccgcgcccggcctattattattattttgagatggagtcttgctctgtcgcccaggctggagtgcgatggtgtgatcttgactcactgcagcctctgccccccaggttcaagtgattctcctgcctcagcctcccgagtagctgggattacaggcgagcaccaccacacctggctaacttttgtgtttttagtagaaataaggtttcaccaagttggctaggctggtcttgaactcctgacctcaagtgatctgcctgcctcagcctcccaaagtgatgggattacaggcctgagccactgcacccggctctacaaaatattttttatgaataaagccagaatttactaagagtgaatatatctgattttaagtttatagtagagtttaaaatgtaggacctatattttcaagataagtttgcagattggatttagtaacccgatcgtctcttcatgattgtatgcctttttccaagggctgtaaataggtataccttgggccttgtctgagaagcataaccttcttgaacctaaaggacccttcagacgagagcttagtaaaataagtttagaatgagattctattctaccttcataacagagcatgtatcttctagcaacacattctaatatcattgtcagaaataatttcttatatctaagtatctttttattctctttgttgttcccttctaactcaaatggtggaataatcaatctgctttcttattggggtacgtattttaaaataaactttaatgaagcttgtctgagtttatctagatcattgggaggtggtattttatgtcttccaaagatcacactcattttcctatagtgtaccaggtgactagaagcttaagagcatcatagcatctgtcttgatgatagattttggaagagttcagaagacaatctattctttatcagattgaattttcaagctttgattcttttcttgaagttacttctacatattaatcagtgaggaaaatttcttaacaaagcttattatgtagcatgaagtagaagattcaagatcttgcctgcctttctctgtgttaccacaagtgtgtgtttatctacagtacttggcacacacacacacacagtgtcttattgtgtgttctttagttttatttaggaagcactggcatatttaactgtactagtgtctactgtgtatagtaaatgaaacttctttggagactgagtcttttaattatactccttgctttgaagagaaggagataatttttcattaaaattagaaagttaaacggatattaagttgatgctgaattgcaatgccagattctagagtctatgtcagctccattttcagtctagcagccgttagtaaaagacactcggaatccattttcccccatccagactattaatattaaataagactgacagcaaggatttagtgattagaaatactatgtactttgttccactgcctttcaacaagaatcaacatgtaaagttgaaacttcctgaccagaatttggaagactatgatgtaattccctgggccttgattccagaagaaggagctctctgaatatgggtttactagttggtggtgaattcatgagtcgccaactattaggcctttatgtccagatattatcctaatttatggagtaaggtccctgagttctcctctttccttccacagggcaagcaggaggacttcaagacgacagttctggagggtatggagacggccaagcatcaggtgagggtggcattagatgcttgccacttagtagcaagagccgccaagtaggaattgatgcttgcaagtgtttttggctgtggtatccacattttagccagaagcgcaggtgaaatttaacccacaggacataatagtatagtaggagagagtgtagtgagaacaaaggcaagcaaaaccttttgaagtcctcaggccgatctcagccctccactctttgtgttttcgaggagatggcgggtacttttctccccagcagcctttctattaatagtaaacatgatatagaacatagacttaggaatcatgggacccttaaagagaaatacagcagtatacacagagaggaaaagtcacaggctcaaaagtctaaaagcaaaaacaaacgggactgagaggcattctaggactagtcagaggaactatgtgggcaagtgacatctttttaaaaatggttgttacagggtattgggtaccttttttcagttaacattacgtagttaatcattcttcagtttaaacattttgtttctcatgtgaaaaatgtcttttgaaaagtctgaaatacttttttctgttcagaccaaacagtatgagatttttacttctaggaaaaagtaaagaatttataggggccaccatctggaacagttaaaatttatcccagcaatccaaaataacgtatctggatttcatcctttgtctcttgaaggatgtttttgttccagttgctcaaagctggtttatagatacgttttgatagaattggaataggcactacttcacttttggaggttgtcacttttcaactgtcttaagtctactttaaaattatttgttttgcagtttgcatataacaggtcctgggactgtttctatttcactctcttgaactaaaggtagttcattgttaatacagcaattagtaataaggggatccagaatgttaggagcagacttttaaaaatgctgtcccaaggattgcaggttgataatcagtacatggttatcttagcagaattaaaccctgttcagagtctagatctgtggcatataaaccttgaagaatgcttttcatcaaatgacgcacaattagatcttccatggaactgttgaagatcagggatggcctttagagttctaatcttgaagaaagaagttgagttttcttgttttttgtttctgttttttttttgtgtgtgactatttgctcttttgcattaagtaaacaatatcatatattgctgaaagtgaaagcagactttcatataaaagtgtgctgctgattactgttagtagaacatgaattttaagtgtttccaggaatgatggtgactgttgtaaaaccttcaagatctctcttccaatctttgtcacgttcagaagcatgcatttgtgaaatgatcaatcagggttagaaatgtgcttgtaagagatcaacattcttctcttaatgaagccagatgaccctcatgggtatcttggtgccaggatcatatcttgacttcttaaaacccacctcaagttggtgtacacatcctaaatcttagagctagaagagaacttgaggtcatcttgtctaacttcctgccttcaaacagtattttatctcccttattttatggattaggatctgaaacccaaagaagttaaatagattgaccagcaatacaccagcagttctggagaaggagaacccagggatcttgcttcttagtgcaaagactattccttacacccttagaatcctttaaaatagtgtttaccctagaaattaaaaactctgaagtataggaggttgtacaattctcttttcgttttctctctcctccccctattccttattccttttattttaaaacattctaggacttgatatgatacatctctagttttctcatattaagtaaagtctttaatatgtagatcacctcaggcttttattttcacgctagaaatctagttatagttatctacttgatataaaaaattaaaggcaagtaactctcatggaggccttcttttctttgttaatttttatatctctattaccttactgcagtcaagatgctacctatatcttacacgaatcaagaggaagtgatttaatggaatagaggacctgtcatctcacctgcctctcccgctttttctacttctaattaacctacttcaaaaggtctaaattattccttcaaatatttaactacatttattatgtattcagagaaagtataagccagtcagaccattagaaagggcagttctgctttagagtgactgcattctgaaaggtgatgctggaatttcctgtataaaggtggtgagcaggaaggaactgaacagaaagtaagactggtatttaggcaacttggagctttttaataatttttgaatgtttcaaagacaacgttttggaaacattctaaattttcagaataccagattccattacttaatggaaaacgcaaacaccagagtacaaaactatcagagccaagtgtaaattacttctgaattaatgtgtactgttggtacttttaggatgttattaaaatcatttgtattctaaaagatttttcctctgaaagagataggtactcatgagttagattatccaaaatggtgtctattacttcattttggtactatcctataagaaggatgttttgatttagcttctcaacagtttaggttacaaattaacatacattttttttttctttaagaaaaggttagctttttatcttgcaggcttttcaccctggttttgataatggtcttcattccttaaaataagtatccctaaacaccaaagggaaggaaataattattgagagtttttagagaccatttttcatttttaaaaatgatatcagagtattgagaatagctagttttcttagatgctgtttagaagatagagatggagaagaatattattccaagcatacattaatgtcaccacatttagtttctttaaatgcctttgtttaaacttctgatgtttgatttaaaaatactttgaaactgctggatgacatataaataacatttcttaatcattacatattctcaaaaattccccaaattagccaactacattagagtgatttttgataagaacatctgaggccaggcgcattggctcattcctgtaatcctagcactttgggaggccgagatggtgtatcgcttgagctcaagagtttgagaccagcctgggcaacatggtgaaaccccatctctacaaaatataaaaaaattagacatagtggcttgtacctgtagtcccagctacttgggaggctgaggcagcccagctacttgagctcaggaggtgaaggttgcagtgtgagattgtgcccctgcacttcaggagcctggacaacagagggagaccctgtccttccccctgccaaaaaaaaaaaaaaacatctgtagtgagcagccaaatgtactataaaatttggtattttatcctacatgatttttctgtcattgaaaaatagtattttgcagtagaatgttcagtgactacttattaaatgtatagaagataacatagctaaggaagaaaactaccatttttggcagggagaagtggaatttaatagaaatcattgattttcatgttaatagtatatacttatgaattataccaagaattgacctatttagagatacttggttgaaatactcaggatttaatgtgtagataagttctttataatgtgagttatttttagtcttggtggttttgttttgttttcagtttttatttattttgatttgggaatgggagctggggacatcaaagccatatagtttagaaaatttcacattactgaaataaactgtatccacaatagtaagcatttcttcttttcttgctgtaatttcatgctccacctacaatatggcttttactatttttttattttttattttttttacccaaggaataaattatcctgacagtctttaattttgggtatggattagttaaatgtaaggattgttgatttgatttagtaatgtgagacacaatgtttatgtcctcattatctacagtagatggatagttttttctcctggtctctaagaatagtatttcttaatgtgtggcccatgattggcattaggcgtttttgcttgaccacttgttaaacatgatttttttctaggtagtgtttgccatttgaatgtctttgtggaaacagactccttaatagcttagctataattttctaagttaacatctttacctgccttgtttttttaattctcctaatcttactaataccttagcattagttttgcttccattatcagtgcttccaacttcttgttttatgtgctttaaaatgattatatatgggctgagcatggtggctcactcctgtaatcccagcactttgggaggctgaggtgggtggatcacttgaggccaggagttccagactagtctagccaacatggggaaaccctgtctctacaaagaatacaaaaaacattagccaggcatggtggtgcatgcctgtagtcccagctacttgggaggctgaggcaggagaatcgcctgaacccagaaggcagaggttgcagtgagccgagatcgcgctactgcacttccagcctgggcgacagagtgagactccctctcaaaaaaaaaaaaaaaaaaaaaaaattatatatggatatctggcgcctattttgttacttatatgtaattacttaaatggtatggaattttgaaactctttaaattgaatcttgatagtttttataagctggtggataagtacatctataaggtgattttagaaatacatttgcatttattgtgcttgtgtttttaagatcacctaataaaggtgtacttatccaccaatttataaaactatcaagacaatacccaattaattgaagagtttgaaaataacatgttttttgggaggttgaggcaggtggatcacctgaggtcaggagttcgagacaagcctggccaacatggtgaagccccgtctctactaaaaatacaaaaaattagccaggcatgggagcgggtgcctgtaatcccagctactcgagaggctgaggcaggagaatcgcttgaacccaggaggcagaggttgtagtgagccaagatcgcaccactacactccagcctgggcaataagagtgaaacttcgtctcaaaaaaaaaaaaaagagaagaacgtattttacttgcagtgtatagtgtatgtatacactatatgtatatgtgttatagattatacatagtaatattagtagtatatagtaaagcatttctaatgtttctgccagcaaatgtaaattccttgcattcttctgtcttattgttgtctgcttaatttctctcactgcttgccagcgttgaattatgattactaatggatgatactgttgatgggattgtgattttctgctgttgattattaaagtcatctttctgtttcatgctgtaatcctaaaagaaggcatgtgattgtgtttttcgctccacagcttcttttgctttcctgttagtgcattttcctttattctggttctttagttttaaattttattgtacacctgtcagtagtgctaattttaattagatcatctaatatgataaagttattttatggacaaagaaactattttaaatgctttgtcttataaggtagttgtttcactcagtaaagtataaactttggaatgttaagctcaaataagtggctaatatctaaggaagtttcagcttttgagacaattgaaaattttttaaaaaggtcagtctgtgagtgaggcaaaggaatttaagcgtcatcactacccgttttgtattcacttgcacttttcctagatgtcctttgctttcttcgttaggtgtggagggcgcagctttccagagccgacttcctcatgaccggatgacttctcaagaagcagcctgttttccagatattatcagtggaccacaacagacccagaaggtttttcttttcattagaaaccgcacagtaagtttccatttcagctttttcacctggattataaaaagtatatatggctttgatagagaatatgggaaaaataaaaagagaagaaagaattctaaaattatctataatactattattacccagagataacctttgttaatagttatttttcatttgggtatttaaaaaatgtatatataatttttgttttcataaaattgagatccttcttggatacattcttttggatcccttttatacttcacaacctcataaatacacattaagaatatttatttaggctgggcgtggtggctcacacctgtaatcccagcacttagggaggccaaggcaggtggatcacctgaggttaagggttcgagaccaccctggccaacatggcaaaaccctttctctactaaaaatacaaaaattatctgggcatggtggcaggcacatgtagtcccagctacttgagaggctgaagcaggagaatcgcttgaacctaggaggtggaggttgcagtgagccgagatcgtgccactgcactccatccagcctgggcaacagagtagagtccatttcaaaaaaaaacaaaaacctttaagcattaaaaaataataataataatcactttgtccttccctctgaagagaaatctttaccctgttctgctcatcttgttcagcctcttcctctggctgaatgatttaacttcagtgtctgcataatattttgtctgacagttgggttataatttgactgctggacatttgttgccgattttgctttattataattaactctggacagtcttatgcattcttgactctacctattatttccttatgatagaattatagaaggaaaactacgttgtcaaagggttatgaacacttttaaatgttttggacatattgccagattgcttcccagaaaggctgaaccagtcaacccctcccctccgcattgccctgcccatttttattaaaacagtgataatctatgctcctataattggccaaaaccatctcagttctttttcatttcttggattactgactgcttttcacattagtcatttgtatttcttctgtaaatttttctttcatatcttttattcatcaggaattcttatttagccagagagtaaatggatgagggaaaggtgctattcagaacatgctcatgttactctagggtggtacaacgcagaagaaattaaccttgtgattcagctaacttgaatatgaatatagctcagagatgtcattgatatgtctgctttttagccaccaccagcttctttgttttggctattagattgcaaaaccactgcttaatttcgattgttaaagcaattgataggttatcctgggtttttgtaaaacagaaaagaacagtgaagaaaagatggtgagttttttaaaaagtgaacagaaaattcttagtgtgtagtcgctgatttgtcttataattgaatcagtttctgtgtatagcatatcaacatttgctctaagtggatttttttttagacaaaattgtcatttttttgtttgtttgttttatctgaagagagttttcactttttacttagatttgagcgatggatttacagggatctctgtcttttctgattcaccaaaaatccagatttggggaagggtttcccgatgttagatttgtggtc

SEQ ID NO: 952 - DNA, 2657 bp, Homo sapiens
  source 1..2657: mol_type = other DNA
caggctgttgcgggagcgcgccctcagcgaagcaagtgaggcatctcactgggaaagtcgaatgtgtgtggcggccgccgccgaggcgggttccgaagagacctcagcagggcaggccagggcctacgcgaacgcccacccttaagagcgcggggacagggaactggagcgttcctcccagcccccgacgtcgcgggcccagtgtccccgtccaggctggttgggcgcacgcgcggccccactcgcccccacgcgtgcgtccccgctggtcccgcccccggccggaagttccggcggcggagctgggccgggcccgagcggatcgcgggctcgggctgcggggctccggctgcgggcgctgggccgcgaggcgcggagcttgggagcggagcccaggccgtgccgcgcggcgccatgaagggcaaggaggagaaggagggcggcgcacggctgggcgctggcggcggaagccccgagaagagcccgagcgcgcaggagctcaaggagcagggcaatcgtctgttcgtgggccgaaagtacccggaggcggcggcctgctacggccgcgcgatcgtgagtgcgcccgcgcggggagggcggcggcggtggcaccggggagggccgggcccgggcccggccggccccaccgagggtctggctcctcttcggggcgtgtcctcggctcccaaagcccagccgtggttctcgagcccagcgccgggtgccggagaacgagggtgcgatgctggatggaggccggccgggtggggggagggcaggggccctcgacccttgaggaccccaggtcctaagcccggactctccaaagatttggaaaactttacaaaaccaagtggaatcaagcggataggctcagccagtactccactgtgcacagatccttggacccaggggctttgacaactgagaaacctagtttcttgattctagccagagcgcagaagctgggacgggccgtgggtcagagtgggcacgctgagcctacgccctcatgcggctggcccggccttggtccctagacccggaacccgctggtggccgtgtattacaccaaccgggccttgtgctacctgaagatgcagcagcacgagcaggccctggccgactgccggcgcgccctggagctggacgggcagtctgtgaaggcgcacttcttcctggggcagtgccagctggagatggagagctatgatgaggccatcgccaatctgcagcgaggttggctgacaagctgcccggttgtggggcctctggggccaggcgggtggactggccagagagtgacgtgaagcccccgttccccagcttacagcctggccaaggagcagcggctgaacttcggggacgacatccccagcgctcttcgaatcgcgaagaagaagcgctggaacagcattgaggagcggcgcatccaccaggagagcgagctgcactcctacctctccaggctcattgccgcggagcgtgagaggtgggaccctcaccccaggccgccctgtcttgggataattctgaatcaccgactcccgacacaagcgtttatcgaaggctttactggcaagcaggaaatgtggggaagtgtggatgttagctctgagattggggtgtggtcagacatctggccaggtccatctctgaccggctcctggtcaacccccagggagctggaagagtgccagcgaaaccacgagggtgatgaggacgacagccacgtccgggcccagcaggcctgcattgaggccaagcacgtgagggtgccccccacccacatgtgggtctgtgtgtgtgcacgtggcgtgggagcatccccgccttgtgttgggtctgtgccccatggaggagggaggtggggtgtctcccccaagcacagcactcaactcttcacaggacaagtacatggcggacatggacgagcttttttctcaggtggatgagaagaggaaggtgagtgtgtgtcgcttgctgccgatggctggcaggtgctcgtgcagtgccccttttcagcctctgaccgtgtgcccctgtgccacagaagcgagacatccccgactacctgtgtggcaagatcagctttgagctgatgcgggagccgtgcatcacgcccagtggcatcacctacgaccgcaaggacatcgaggagcacctgcaggtgaggcctgcggctgggggagcagggccagtggcatggtcctgggccccatgactgccctctgcccttcttgtcactgcagcgtgtgggtcattttgaccccgtgacccggagccccctgacccaggaacagctcatccccaacttggctatgaaggaggttattgacgcattcatctctgagaatggctgggtggaggactactgaggttccctgccctacctggcgtcctggtccaggggagccctgggcagaagcccccggcccctatacatagtttatgttcctggccaccccgaccgcttcccccaagttctgctgttggactctggactgtttcccctctcagcatcgcttttgctgggccgtgatcgtccccctttgtgggctggaaaagcaggtgagggtgggctgggctgaggccattgccgccactatctgtgtaataaaatccgtgagcacgaggtgggacgtgctggtgtgtga

SEQ ID NO: 953 - DNA, 32744 bp, Homo sapiens
  source 1..32744: mol_type = other DNA
aaggcggtggtagcgcctcagtggtgtgggcctgagccctgcccaggtgcccgcagagagcagccgggctgccagcggtgagtgctatctttcgcggcgacggcggggtgggtgaggtcgggccccaagactcggggtttgccgggcgcctcagttcaccgcggccgcctggctctctgcgtcggggtgggccctcgggcctgggcactgcgcgtctggcccgacgctcgggcggaaggcatggctcccaccccggccctcctccgcgtcgcccttcccctagagctgatctcccgcggcggcctgagggtcgacttttccacagcttgggccgagagagcccggcaggccctcggctgagggttagggctcggtatctcagggctcggggtccagtccccgcgccgccgccccccacgggctaagccactttaactctccgagcctcagtttccccatctgtacgatgaatgggcctcgggaggcagcgaattctgggggtacctaacgtgagaggcgctcgatgcatgctcatgggacccgaatctaaccctgcagcatcaggtgggctgagtcgatggatcacgggagccccccagcccggcctgcatccctgagggcagtgcccctcgcagtcaggtgtctcggcggcccccacaacacaggtacccggatctcctgggggagccgggacacccttagatcgggggagcaattgggtaagagttcaaggtctcttgggcgccagggggaggagagtagaggtttcagtgagcttgattgacttcgactttctgcgtattgtttttcaaaacgagttacccttgtgtaaactggtgaccactaataaggagtttggggctgtttcaatgaaagtggctgtctcctctcttaaacccttaaagctgcagccttgccttgccttgcctctgagcttggccaagctggagaatgatgccagcacaaaaggagacaggactggactgggtggccctggtttgattcttggcaagcaagatacctcctggagcctccgttttctgatcagtgggtctggtagtaagacagccaccctgctctccccacagggttgagattctgaggatcaagacagggtcccagagagtggcatcgagaactttaatcctccttgtaagcagaacgtttatggaaccctctgggggatccagtatccccaccgttgttcactgctgtaattccttgggtcttgctttatggagaaggcattgattcattaaccatttgcaagttctacctacggaaatcccttttgagtggttatggggttggcttggtcaggagaacagctccaaaggcccagttagtaaaccagggaacccagaaaggtccacttccttttttttgggaggagggctgttttaggagttcttattttccttttaagagagtggtttttgagctacttatgaccttcatgccatctaatgttggaaactttcgctgagcagatagcttattataaaaagtatttgtacaacatccgcatttcagagaatgggatgctagctgccagttgcgtggtggtgtggaaacttaggagtgatcttaattttccaaaattcttcaggtctagcacttgaagaaataataggtagatttgaaatgaaacaacccagggatattcctgaaaacagcagcattgaccgcagccaatgtaaatcaggtgtggatcgtcctgggtagtaggagtttataaatgccacagaggatgtttgctgccagacatacctgaattttaggacctgctgttggttaactctgggttgatccacccttaaccccttgaaaatcagaatctgtgttaggtaagtctgtgtatgattaggagacaggccaattgaaatcaaaactgcttggcaaatccagaacatttactcgtgaagtccatggaacatttcaagttaaaaataatttagcttttaagtaacttttttttttttgtgagacaggtctcactctgtcgtgcaggctggagtgcagtggcgcaatcatagctcactgcagcctcaacctccaggattcaagcaatcctccctcctcagcctcccaagtagttgggagtacaggcacgcaccaccacacccagctaattttttaaatgttttttagagatttggtttgccatgttgcccaggctggtctcgaattctggggttcaagtggtcctcctgctttgacctcctaaagtgctgagattacaggtgtgagccaccgttcctggctttcttatttcttcttcttttttttttttttttttctgatggaagctcttgaagttataggacctttcatggttccagagaggctggccgcccctacaagagcttcgatgtccttgtgctttagggaggagccagagaaacagaggtcaagctctggcactagcaccgtgtgtggcctcaattgagcatgttgggatttaactttctgttatatgtcagactcacttaaaaattaaagttagaaaaaggtgaaatggagaaatgacaattttcttttcttttcttttctttttttgagatggagtctcgctctgtcgcccaggctggagcgcagtgggctcagtgcagcctccacctcccccaggttcaagcaattttccttgcttgaattctgcctcagcctcctgagtagctggaatttcgagtacccaccacctggccaaagattctgtgctcattagcacacagcctcccaggtggctacagccttaaaagactttcaaatgccaattctaggctgggaacagtggctcacgcctgtaattccggcactttgggagaccaaggtgggtgaattgcttgagtccaggagtttgagaccagcctgggcaacacggcgaatccctgtctctataaaaaaaatacaaatacaaaaattgactgggcatggtggctcacgcctgtaatcccagcactttgggaggccgaggcaggcagatcacttgaggtcaggagttcgagaccagcctggccaacgtggtgaaaccccgtctctactaaaaatacaaaaattagccggtgtggtggtgtgcacctgtaatcccaactactcaggaggctgaggcagaagaatcacttgaacctgggaagcggaggttgcagtgagccgagatcgtgctgctgcactccagcctgggtgacagagtgagactctgtctcagaaaaaaaaacccaaaaaacaacaacttgttttgctgtgcagttttgtcatctggcattgggcagaaatttggacccgccgggcaggtgggagaagcatctgagtcagaggtcacttacctgcttgcataggccgctgacctataccaagccttagtttcttcatcactaaagtcagagaaagaacccactccacctgcctctgggacagctcagaacatgttaaccctttcagcagtgggtccttcttcatcttcttggcgctgtttggatccctgtagcgtgacacataaaaaagcacacatccggccttaggatatgtgtaggctctggtttgggcacttgagaactctcacagggagggaagcaagcatacaattcaacaagaatggcacggtgtgttgcattcattctcaagatgatggggtgaggcttttattagtgctgagcctgctgtttgtttccacagcagggctccaggggagaggtgatgtttgagttgggtcttggaggattgctaggagttctctgagcccacccaggcacaccagctctggggggcatgtagggtgtagattgcatgaggctgaggtcgcgtggtggcacttgtctgaaatggtcctaggaaccatgggaagagatggggaggtgttttaaaaggtcagggctatgtgactagctcagatcagtgttgtgtgttttttttttttttagacagagtctcactctgtcacccaggctggagtgcagtggtgtgatcttggctcactgcaacctctgtctcctgggttcaagcaattcttgtgcctcagcctcccgagtagctaggattacaggcaccggccaccatgtctggctcaggacagtgttttcttgtactgaatattctcttactgcctaatatcctctctgggtgaatgaacaaccatttgggaaatttttactgtgtctaaatttgtaatcatactgttttagagctctacatcttaaaagtttttcctccccaagcgagatgtttacatcagttgtgttcttgttgggattagtgtgcacacgcctgtctgcatctgtgcgtgcgtgtgtgtgtgtgtgtgtgtgtgtgtatgcatataagagggagagaagatggaggaattccatgggggcagaccatggttctttgcagattggtggctccagttggttgggttcactggagccacgttcatcagtttgtttctttctttccttttctctctctgtatgtttatttatttatttattatttgtagaagtggggtctggctatgttgcccaggctagtttcaaactcctggcctcaagtgagcctcctatctcagcctcccaaaacgctgggattacaggcatgagccaccgcgcccagcccagtaactgttactcctgacgctggtcggtgtggcaactcagttgatgcttggacgtgttgtgaacaaagccccggggaacctgatccttctggtggcttgtgcagcaaactgttgatgtgggaagcttatttatttcacttgttaaagaggtgacttggatagggggatatctaagaattgtcctttcattggagtgctggagggtgtggcattcggatctcctttgtgcagcatctgtacctagctgagagaattgtacacataatttcccgaaatgcgtcagtttcaaggctaacttagaatatgttggtggccagactgtggtgctgtcagctgtggactgttctccaagagttgaatttctttttttttttttttttttttttttttgagacagagtctgactctctcgcctaggctggagtgcagtggtgtgatcttggctcactgcaacctctgccttccaggttcaagcaattcttctgcctcagcctcccaagtagctgggattacaggcgcgtgccatcacgcccggctaatttttttttgtatttttagtagagatgaggtttcactgtgttggccaggctggtttcaaactcctgacctcaagtgatccacccgcctcagcctcccaaagtgctaggattaccaggcgtgagccaccatgtccagcttataagaattgaattctttaggagacatttggtaggagaatagaagggggaaagttgccttttgtctacttggatgtagtaatgaggaggaagatggggcattgtggggcgtgtcctctaacttggaacagatgtaatttatttctaggtgaaagttaagaacagtgcttactcattctatttatctgccctccttttatcttcggcactttttcctacagccctgtttctgagctcacgtcacatcacctctgcggtggtgatgccggtgttcttagagcactgtgtcctagtgatactttgatcttcgtgggcatgcatcatcagtgcattgggtaagccgggcctgtacaaaggtttgcaggtttggttaggaacacgtgaactacggtcacctttctgaactttctgaactcatatgtagtgaccataggtcacctgggttgagttttcaacactgcaaacagggatggcagttcttgaatacacaggagagtgcattagccagtggtgcccggcatcattcagagtgcagtttggcatcaggaatgttccgtcaggtatttgtggtcttgtggagaaaagccactgttggttttggtgaagggcttcagaccctttgactgctcatgaaaccacacagtcttaacatggacacgttggacgcgttccttacgtaacgtgatttgcaaactcaggagtcattcagcgtcacagcagtgatcaaaagctcccagcccatctacccgaaacctccacaacaagagctctatctgtcagtggcctcaccgacttcctgggccctgaagctccaaggacaaaagactcctgtcccttttcccttcctctccattctgggtctcccaccaccaccaagtcctgtaagtttttagtctttttttttttttttttttgagacagattcttgctctgttgttcagagtgcagtgacacaatctcagctcactgcaacctctgcctcccaggttcaagtgattctcctgcctcagcttcccgagtagctgggattataggtgcgcggcaccgcgcccagctaatttttgtatttttagtagagacagggtttcactgtgttggccaggctggtctcgaactcctgacctcaggcgatctgcctgcctcggcctcccaaagtgctgggattacagcaggcgtgagccaccacgcccggccctttaaatctctttccactgctgtggtcttactgtagccccttgtcacttcctgctgcgctgacccgtaattgacccataattctccctctcttcccctccctaccacgttccaagatctgtccatggtaccattgctggttgatcttggaaccctgcttcggtcacccctcctttctcttcgcccagactggagtgcagtggcacgatttggctcactgcaacctccacctgtcaggttcaagtgattctcctgcctcagcctcccgagtagctggcactacaggcacgtgcctccacacctagctaatttttgtatttctagtagagacagggtttcaccatgttggccaggccagtctcgaactcctggccttaagtggtccacccagctcagcctcccaaagtgctgggataataggcaggagccactgtgcccggtcactgtcactgtcttattgcatgttttcttcttcatctgctttcataaaggataaacagtgacttaataaaaggtgtctaattctcccctccctagtggcaatacggttggactagaaggtgaattcagttgagaacagggaacctatcatttctgcgagtgtaagctggggcatagaacaatgccaggcataaggtaggcacttggatgaatggatgaatgaataaatatggcttctgtcccccaagtttactgctgagctttctcctgcatattgactgagctcagatgtcaaaattgggtctgatctgtagttttttttttttttttttttgagacagagcctgtcactctgtcgcccaggctggagtgcagtggcgcaatcttggctcactgcaacctctgcctcctgggttcaagcaattctcgtgcctcaacctcctgagtagctggaattataggtgtgtgccatcatgcctggctaattttttgtaattttagtacagatggggtttcaccatgttgcccagctggtctcgaatgcctgacctgaagcagtctgcccgcctcggccttccgaagtgctgggattacaggcgtgagccactgcgcctggcctggtctgtacttctgaagattattccaaagtacagtaggaacttttggtaggactttagttttccatccaggtataaaattttgtgtcagtggtggggttgcgcatgttcagtagctgcaacactagaaagatggcaaagcaggagcaaagaaaaatccctttggctccagaaaatctcctgaaagcagaaggcttatcaaggcctcaaagccacccagtcaaagtaggcacttttggcaaaggaggagcagagggaaggaaaagagctcaggtttaaacgactggaatcattcctacatgattcctggcggcagaaacatgacaaggtgtgtctcagacgactagaagtaaaacctcacaccttggaatcgccagataaacattccttggcctttgttgtacgcgtcgaaaggattgatggtgtgagtttactggtgcggagagccattgcaagacttaaacctaaaaatgcagcgtatagtatgtaaccttatgtgacctggggatttccaaatctgaagtctgtccagaaactcattttgaaacgtagacaagccaaggtcaagaataagaccatccctctgacaacacagtgattgaggagcacctgggaaagcttggtgtcttttgcttggaagacctcattcatgaaattgccttcccaaggaagcatttccaggagatctcatggttcttgtcccctttccacctctcagtggactgtcatgctaccaaaaatagtggactttctgaaggagattggcacacctccatcttcttgggggtgtgtgcatcaatcagctcatccgccagctgaactagagccaggtgccaaactacagtaaatttttatcaatgaactggaagcttgtgttatttttgggggcggggtggaatttttatcaagtatcttcagagaagattatttcctgctttatcttcaaaaactgtaaaggaagggtcaaaggaaagacagtggctggccgggcccggtggctcacgcctataatcctagcactttgggaggctgaggcgggcagatcacctgaggtcgggagttcgaaaccagcctgaccaacatggagaaaccccgtctctactaaaaatacaaaaattagctgagcgtggtggcacacgcctgtaatcccagctactggggaggctgaggcaggagaatcgcttgaacccgggaggcggaggttgtggtgagccaagatcagacctttgtcctccagcctgggcaacaagagcgaaactccatctcaaaaaaaaaaaaaaagaaaagaaaagacagtagcttacgttcatggcggcacctctcatcacagtccagttccaaggaaaaattccagcgttttctacgttggctgctgccttgtctgaaatcacattttgtggagaaaggagtcttgctttgttgcatcttctatcctagggtttaatgttggtgaatgagtaactctagcatttgtacaaggctccctaagagtcctgcagcagtcgaccaagcccggggacataattgaatccggagattcctggggccttgaaaaaggcttgaaatatacataggaagaaaggcacaaaaataaatgctcacttgtctctgcaaaaaaaaagaaaagaaaaattgtgtctcaagttccttctgtagttgataatttattcagtaatcattttataattgaagaagaatattctgactctaaatctttctagatcagttacctggatgctgaagacatgaataaatttgtttattttaaaaatcctagggcctggcacagtggctcatgcttataatcttagcactgtgggaggccgaggtggacggatcactagagcccaggaattcaagaccatcctgggccacatggcaaaacaccatctctatttaaaaattagtgtttttaaacatcagtgtttaaaaattagctgggtgtggtggtgtgtacctgtcatcccaactacttgggaggctgaggtgggaggatcacctgagcccagggaggttgaggctgcagtgagccatgatcagaccactgcacaccaacctgggtgatagagtgagacccccatctcaaaatatacagtaataaatgaaaaatagaaaattccccaaataaataaataatagaaaattctaatgaaaataaaaggagttgagtgtaaccgttgagtgtctgcgctgggtgtttatgtctcatgtaaccaacgtagcactgtgagcatggtcatcccggagacggactgtgataaatcgtgtgcccaggatcccagagtgcataggtggcatatctaggttttgaaccaaggtctgttggtcttttatagctcaactgggttgtgagtttgttgaatttcactttccatgctttccccaaccaaaccaaaaaccagagggggaactgaaagctgagagcctagtaattgagaaaaggactctgggaggtgatggtgtcaaaaagcagtccagggaagctcttgtggttgagcacacagctctgcccagagcttcctagatgccaaggcaaagaaggatggggttacatagcagttattggaaaaaggaagctgaccagtttctcattagtatttttcagctgggcgcgatggctcatgtctgtagtcccagcactctgggaggctgaggcaggaggatcacttgtggccaggagtttgagaccagcctgggcaagagagagagagagagaccctgtcccttcaacaagaaaatacacatttaaaatattagccaggcatggtggtgtgcacctgtagtcccagctactcaagaggctgaagcaggacgatcgcttgagcctgagagttcaaggctgtagtaagctatgattgcaccacgacactgcagcctgggtgatggagcaagaccccatctcttaaattttttttaaaaagtgcttttccctgggcctttacacgaggatcattgaataaagcagtggtcagcagcccatgtactcagcaagtatttgtagagcaccacgtatgtgccaagctctcttcgaggtgctgggactacttttgtgtgtggaaaagaccaacaagatgaaagatgatgttggcctaggccagggtggaggcactgttttcaagaacaggagtgttcccacaggtgaccctttctgggtcccatctaggtaagaggctgagaggttcaggctcggttgtaaattctgtaagggcagttctttgggaggtgtgagcaagagaatggaatcagagcgattattttagcaggcaggagtgaagcttgagaatctggcagagtgaggagcgatcttgtgccagagtgagaggcagccagtccaaagtgaaggttctgaagctcttagtacctcccacgtacagtgtcctgcttttttttctttctcttttctctctctttttttttttttttttttttaaggcaggacacttgctctgtcacccaggatcattgctcactgcagtctcaaactccttaagcccttccaagtagctgggactacaggcacacaccaccatgcttggcgagtttttctttctttttgcagagatggggtcttgctatgttgcccaggccgatctcaaactcctgggctcaaacgatcctcctgttgacctcccaaagtgctggaattacaggcatgagccactgtacctggacccctgctatttttcctgtgatatttgaaaagcttggcttggtttcttgccctttagtaggtgattgcaggcagagccacgaggtcttagaaagcagcacggctctgttccgatactcctggctgaagggccagtgtgctgtgccattgagggagaagcattgactctggtctgggagattctgttcatttagtcattcagcaaacaaatattgagtgctggccaggtgtggtggctcacacctgtaatcccagcactttgggaggccgaggcgggcagatcacctgaggtcgcgagttcgagaccggcctgaccaacatggagaaacctgtctctactaaaaatacaaaattagccgggcgtggtggtgcatgcctgtaatcccagctacttgggaggctgaggcaggagaatcgcttgaacccggggggcagaggttgcagtgagctgaggttgcgccattgcattccatccagcctgggcaacaagagcgaaactctgtctcaaaaaaacaaaaacaaatattgagcactcatgttatgcaaagtctgatgagcaccagggttacagaggtgcaggatagctccacccagacacgagaccaatcctgtgtccttctgcagggattatttcatcttgggtaatgctgtcatctgatgatgtggccaggatgtcagctgcaaaatgaaccccaggtcattcagtgaggctgcgtctacctgtaactttgccatgtcctaaaaaggtcttgaagggcagacagatggttgatagaatagctctggagacagttggtctgggtttgaatcctggttccaccatttatcgattccctgatgttggacaaggtcctttaacctttgtgataattacagctcctgtatgtcagagcagtgttaaaacactgttcattagttaaaaacaaatcagggccgggcttggtggctcacacctgtaatcccagcactttgggagattgaggtgggctaatggcttgagcccaggagtttgagaccaacctgggcaacatggcgaaaccccgtatcttaacaaaaaattaatggggcttggtggtgggtgcctgtagtcccagcaacgcaggaggctgggctgtcatcacgccactgtacagcagcctggctgacagagtgagaccctgtctcaaaaaaaaaacaacaacaaaaaaaaccccaaaaaacaaaaaccaggtcaggagtggggagtgactgctgatgagtgtgggatttccttttgagggtatgaagatgctctggaatctggtagtggtgatgcttgcacaatgggtgaatatagtgaaaaccactgaattttatactttaaaatgatgaattttatggtgtgtgaattctgtctcaattttttttttttttttttgagactgactctcgctctgtggtccaggctggagtgcagtggcccaatctcagcccactgcaacctctgcctcccgggttccagtgattctcttgcctcagcctcctgagtagctgggattacaggtgcccaccaccacacccagctaatttttgtatttttagtagagacggggtttcaccatgttggctagactggtctcgaactcctgacctcaagtgatcttgccctcctcggcctgaggcatgagccactgctcccagtctctatctcaggtttctttttttttttttttttttttgagacggagtcttgctgtgttgcccaggctggagtacagtggaacaatcttcacttaccacaacctccacctcctgggttcaagtgattctcctgcctcagcctcccaagtagctgggattacaggcacacactgccataccagctaatttttgtatttttagtagagatagggtttcactatgttggccaggctggtctcgaactcctgaccttgtgatccacccgcctcggcctctcaaagtactgggattacaggtgtgagccaccacacccggcttctatctcagtttttaaaaatcaggtttataggtcatgagttcttgagcaactagactcccaccagttgtgcctccagttccctgtcatcttgagctagtcgtggacacctgcagcagacgtatgttcactgcgtgtttctgggctcccacacatttctaagccctcttgaagttaacttcgggtaatggcctgtgagaggaagtcacgtatgtcacttctggatggaagcatttaagagccagggccaggccctccagcaatcttcttcccatcaggacggcccggaagttgaacattgagatggtggaatgacaagagaaaaagctgcttgaaccactgagtcaccttatggaggccaagggcctagcggagtcaccctgcccacactagacgttgcttagagttcagcttgaagccatgtgatgtgggtcactgcccaggaggacttttttctagtgctgtggcctggaggactttccctctagcctctcatgcaggtgtactgtgtgatgtggtgggtctcttttctaacaggaagccccagtgggtgcagcagagctgtggctctcccaactcaagcacatctccacagctagctgccggcaagtacgcagctctcttggtggtgtctgagaaatggagcattaagccctcagtctaaaggagcatcttgggtaacctagtgtacctgtctcgagcagcaggcatagtacaatgtcaggccagcaccaaaggattttgtcttccttgtaagacaacatggggcaatagaaagctctgtatgggcaatcttgtaaatggtataataattatgatgcttttatagacaccgcatgaccgtccttagtcaccatagcgatgggatctaattattactgacttgttcatgttgtgggtttttagtaaccctactgcccacattctagaatttaaacacatgctgtgaatatccaagcacaggtcacagagatgacctagagttggtgctcagtacactttttttgtttttttgagaccgagtctggctctatcgcccaggctggagtgcagtggtgcgatctcagctcagcgcaacctccgcctcctgggttcaagtgattttcctgcctcagcctcctgagtagctgggattacagagcatgcaccaccatgcccagctactttttgtatttttagtttcaccatgttggccaggctggtcttgaactcctgacctcaggtgatcttcccactttggcctcccaaagtgctgggataacaggtgtgagccaccgcgcccggcctcaatacacatgtgattgccttgaatgcatagcaatgaccgaacatcaaggtgaaacgcaagcaacgctggggaaggaatgaccaatacggtgccctctgaggcctcagcccaggggccatctggcttgtctgtctcattagtaccattgttccctgtcagcttgtggaagagctgatttgaaaccacctgttggaccgaaggaagccactgaccaatacctgttctgtgggtgaagctgtcgcccagagcaccccctgtgactccgtggtcctctatgcactagtagaaactctgtttttgctgaatggcacagcccactactagctgaatgtggggtgacagtagccagcatgagaaccatcaagaccattatgggccaggagttgggtcaccccttccttgtctagggttgcaacaagaagtgacagagagggtcccacaaggtctttaaatctccctctgtaagttgtgggaatttcagtaacttgcttggtccttagggctttgaatctgagtctgtaaaatgggtgaaataatatttctctaaacaggtttatcatatgaatcaaaagaaattgtagaaggtgcctagccagggtgcttggcacgtagtaggtgttgagtgaacgttggttgcattgcttggctcctccttagtgagcctgtagtaaacacagtgctgtgtagactaggcaggcctttctctcttctgcaattctgagtgctttttcttaagaaccaaggggtactaacccttgttttagagacattcagaaactagccaggcgtagtggtgtgcacctgtagtcccagctcctcgggaggctgaggtgggaggatcacttgatcctgggaggtagaggttgtggtgacctatgattgcaccactgcactccagcctggacaacagagcaagaccctgtctaaaaataaataaaataaaataaataaataaatgtaaacaaggaaatagaaaacgtttatactgatggagtctcgctgtgtcgcccaggctggagtgcagtggcacgatcttggctcactgcagcctccacctcccgggttcaagtgattctcctgcctcagcctcccaagtagctggaattacaagcatgtgccaccacgcccgtctaattttgtatttttagtaaagacagggtttctccatgttggttaggctggtctccaactcctgacctcaggtgatccgcccacctcgacctcccagagtgctgggattacaggcatgagccaccttgcccggcccttatgtatttattttttaaagacagggtcttgctctgtcacccaggctggagtgcagtgttgggatcatatctcactgtaacccccaattcctgggctcaagtgatcctctaacctcagcctcctgagtagcggggactacaggtgtgcaccaccacacctcactaattttttaattttctgtagagatggcgtttcactatgttacccaggctggtctcaaactcctggcctcaatccatcctcccgcctcagcctctcaatgtgctgggattacaggcatgagccactgtgcctgtccagcaacaatatttataacagcccccaaaaggaaacaatccaagtatccatcacccattgaatggataaacaaaatgtggtatatccatacgatgaaatgttactcaggcatgaagaggaatgaagggcttttatgcatgccacaacgtggatggaccttgaagacattattctaagtgaaagaaaccagttacaaagggccacttattgtgtgattttatttatttatttatttatttatttatttatttatttatttatttgagacacagtctccctctctcacgcaggctataatgcagtggtgcagtcttggctcactgcaacctccacctcccaggttcaagcgattctcctgccttagcctcccgagtagctgggattacaggcgcctgtcatcacacccgactaatttttttgtatttttagtagagacggggtttcaccacgttggacaggttggtctcgaactcctgtcctcaagtgatcctcccgccttggtctcccaaagtgctgggattacaggtgtgagcctccgcacctggcctgtttttccttttaaagccgtgactctattttcccttctggccttggtgtgtgctcttccccactctgtctccttcccttttgagtcctttccatcaggaagccctccttaaccactaccagactcacccacacatgaaccggctcccaccatctgttctgtttattttggcaaggaaataaagatgtgtcttccaccagaaaagctgaggccactactcgattcagtttgccctccctgctggggcacaggtgtcatggcctcccttaagtgcttattaattcctgtgtttcagctttcatccttccacctgctgctaggcctctgtgcacacagtgctttgtggaattgctcccgtctcttcagcttagcagcgtgccttgaagaggaagagctgcagagaaattttgaaaataaattgctttttgaaaaataatttgacagtaagtcagggaccttgaaaatatttgttccctttgattcagaaatatttctaagacaaattcagaaattctttttttttttttttgagacaaattctgtctctgtctgcccaggctggagtgcagtggtgcagtcttggctcactgcaacctccgcctcccaggttcaagtgattctcatgcctcagccccccgagtagctagaactgcaggtgtgcaccaacacgcccagctaattgttgtattgttttatagaaacagggatttgttgtgttgcccaggctagtcttgaactcctgagcttaagcaatctgcctgcctcggcctcccaaagtgctgggactacaggcatgtaccactgcgcctggccagaatttctattttaaggaacttatcagtggcttacaaagacttatgttgaaaatatatcaatcctgtttttcatgacttttttaaaaacagttttaatttttttttctgtactagaaaatgcactgtaacttgacattgtaatagtgaaaatataatgacatttgagaatttataacaagaaaatgttcacaatttaatatatgaaaagtagaacaaaattatatgtagtataagaccgatcatgttaaaaacatgggcgggcacggtggctcacacctgtaatcccagcactttgggaggccgaggtgggtggatcacgaggtcaggagtttgagaccagcctggccaacatagtgaaaccccatctctactacaaatacaaagattagccgagcatggtggcaggcacctgtaatcccagctactccagaggccgaggcaggaaaatcccttgaactcgggaggtggaggttgcagtgagctgagcgagatggcaccactgcattccagcctgggcaacaacagagcgagactccatctgaaaaaaaaaaaaaaaggaaaagtatgtcctgtaatatgcatgtaaaaaactggtagaatgaaaccaaataagagtttggattatgttttccttaattttatgttttaaaatatagcacattttcttcactaaacatgcttttaaattttttaattgacaaagttgtatatatttatagtgtatggcatattgttttgaagtctggtagaatggctaaattgagttaattaacatatgcattacctcacacctttttttgtggtgagaacacttaaaatctactcttagcagtcttcaagagtacaacacattgctactaactatagtcaccatgttatacaataggtctttgttttttttttttttttttttttttttttttgagcggagtttcactcttgttgcccaggctggagtgcaatggcgcgatctcggctcactgcaacctctgcctcccaggttcaagcgattctcctgcctcagcctctggagcagccaggattacaggcacctgccaccacgcctggctaattttttgtatttttagtagagatgggggtttcaccatgttgcccaggctggtttctaactcctgacctcaggtgatccacctgcctgggcctcccaaagtgttgggattacaggcgtgagccaccgcacccagcctcagtaggtctcttgaactgtatttaattttaactttttgttttgaaatagtttcagatttgcaaaaaagttgcaacagcagtgctaacaattcttgagcgccctttacccagatttccccattgttaatattttaccatatttgctttatcaatgtgtgtgtgtgtgtgtgtagatatattttttcttgaactatttgagaatgagttgcagatatgaccaagatacttggttacccctaagtacttcagtgtgtattttcttcaaggcaaggacagtttttttttttttggtaagcaaaatacagtgatcaatagcaggaaattaacattgatatcctgtgttgtctaatcatagagtttctttacattttgccgttaatatcttttacatcagaaaaaatatgtttttttcctggtccaagacctcagagtgtgtgtgtgtgtgtgtgtgtgtgtgtgtgtgtgtgtgtgtgtgtgtgtcttagatcactcagtctttgtttatctttcatggccttaacatttttgaaaatgtgaggccgtgtctttgtcaacgtctcacagtttggtttgggtttgtataattcccttataacaagatccagcttccacccgaggcaacagagtgaacaacaacaacaaaaaaagaggtgacctgggtgcttttactaccctacattcagatgtgggagcaaagaaatgacttaaagttggagtttatatttaaaagggaagcggaatgtaagtttggaaaatttgcaggctggccatgtgacagaaagaaaaaactttttcaagagaattcaagcaggctgtggagcaaccgcttgctagagcgatttgtagatttaaaaaggagccaagtgctgatagccaagactgtggggaaaaaaaggccttgaaggcatttcagagaccttcccggcagcccctcccattacagttgtggaggcctcagagggaagaatgctttgtggttcaggcccagtgccagggacagcctcaggacactgctcctcacatccctggccattcagcttccagccttggctcaaaggggcccagatacagctcaggctgccacactagagggtgaaagccatgagccttggccgcttcaatgtggtggtgagcctgtgggtggacagaatgcaagagtgagggaggcttggcagcctccacctagatttcagaggatgtatgggaaagcctgggaaaggggcagaccccttaccgagaacctctggtaggagaggaatgtgggactggaggccccatacagagttctcactggggcactgcctagtggagctgtgggaagggggccactgtcctccagaccccggaatggtagatccaccagcatcttacaacctgtccctggaaaagccacaggctgtgagagcagcctcggattgaaccctgcaaagccaccaggacagagctgcccaggaccttgggagcccacccttcgcaccagcacgccctggatgtgagacatggagtcaaaaggagattatttgggagctttaagatttaatgactgtctgccaggtgcggtggctcacacctgtaatcccagcactatgggaggccgaggtgggagtgcattggcgctatctcagttcactgcaacctccacttcctgggttcaagcgattctcctgccttagcctcccaagtaactgggactacaggcacccaccaccatgcccaggtaatttttgtatttttagtagggacagggtttcatcatgttggccaggttggtctcgaatcctgacctcaggtgatctgcccccgtcggcctcccaaagtgctgggattataggcttgagccactgcgcctggctggagggaccggttttttaattgagagggttggtacttctcccttcctgcctttttccaagggctgctcggggcttgtgtgtgtgtgtgtgtgtgtgtgtgtgtgtgtgtgtgtgtgtgtgtgtgtttcaaagacagagatctgtatttattaactcaggtcagacacttgggatttttcaccaggcatcatcaccaatcagccagctcagattaattaatattaatttggttggtctgttcccaggcccttggtgtgcaggcactttctgtcattaagtccttgtgacccagcctcgtgtgacacatctcccatgatggggagccactcccccaatagcgcattctatgttcagactcctttattagaacgtctttgcttggaggggttgtaaacctctctcctctatgaccactcctatttctgaatgccaggcctctccctttggcagttttctgaccacctaaagaagggatcaagtacctctgaatcttcttttcttaggattaacttttccagtgtctttactgtttctttctttctttttttttttttttttttttttgagagatggtctcgctctgtcacccaggctagagtgcaatgacacaatcatcatggctcactgcagcctctgcagcctctaactcccgggcttaagtaatccttctgcctcagcctcctgagtagttgggactacaggtgcatgctgcgacacctggataatttttttttttttttgagatggagggggtggtctcactttgttgcccaggctggtctcgaacctctggcctcagcacttctccagcctcggcctcccaaagtgctgagattataggcgtgagccactatgcctgtttctcttgtgacaggtgttggggactactgtgccctagagccactttctgagtgttgcagtttgtctttgatgttcaatgtggagctcatttggaattctattaaagaatccttagtgtgccttcccttttggggaagccatgttgacttcggcccatcctattctcatttcggtaaaggaggagggagtagcactgcccatgctgtgggcttgctgccgtggacttgctgtaggaattgtaacacatgcgtgtgtgggcagggggttggggggcaggtggcattctgattgcctccaggtgatctctccagactgttgcccctgcgctggaggcagaagccgacttcagaactgatctgcccagatttgagaaaagtaaagcaagacccctggctctgtttctcttattattattaatttttttttttttttttttttgagaccgagtcctgctctgtcacccaggctggagtgcagtggcgcgatcttggctcactgcaaactccacctcccgggttcatgccattctcctgcctcagcctcccaagtagctgggattacaggcgcccgccaccacacccggctaatttttttgtatttttagtagagacggggtttcaccgtgctagccaggatggtctcgatatcctgacttcgtgatccgcctgcctcggactcccaaagtgctgggattacaggcgtgagccaccgcatccggccgctgtttctgttttctatatttttattcaaaattaattgaggcaatcagctaggcttggtggctcatgcctgcaatcccagcacttgggaggccaaggcaggtggatcagttgagatcgggagtttgacatcagcctggacaacgtggtgaaaccccatctctacaaaaaaaaaaaaaaaacaaaaaaaccaaaaattagccaggcatgttggcgggtgcctgtaattccagctacctgggaggctgaggcaggagaattgcttgaacctgggaggcggaggttgcagtgagcctagattgtgccactgtactccagcctggggacaagagccagaccctgtctcaaaaaaaaaaaaaaaaaaaaaaaaaagaaggccgtgtttggtggctcacgtctgtaatcccagcactttggaaggctgagggggtggatcacctgaggtcaggagtttgagaccagcctggccagcatggcgaaaccccatctctactaaaaatacaaaaattagccaggcgtggtggcaggcacctgtaatcccagctactcgggaggctgaggcaggagaatcgcttgaacctgggaggcagaggttgcagtgagccgagatcgtgccattgcactccagcctgggcgacaagagcaaaactccatctaaaaaaaaaaacaattgaggcaaaagtggggatggtcaggaggatgaaccagcgtgaactcctgtggagagttttgtgcctgtaaatcaccttgtgccaccttttaatgttgacgctggattatatccatgcaatgccctggagcttaggggagctgtggtctcgtccccttggcattcaagccaaggagccaaggccgcagagatgctgctagaagcaggcacggggagctgcagctgcagcatcagcccctgtgggcctggtcagttcgatttgtgctgagtcatgcccactgttcgcctgctgtccctcctgtccccccagtcacgcttgcacagatctgactcagcagctgccttcctcctttcacgtcattgcatcgggcacatgctggtcatgtgtttctaaattaagtcctgttgtgtggggaaaaggccatcagctgggagcgtttggccatggccatcttcagtggagaatgttctccaggataccttggtgaaagccccgtgactgcattgatattaggggtgcaggcatcgttgtacagtagtaccttcctgtagcagcattctgatcacagcacccccttgccctgtcctcaccagcttccccagggccaaacaccttagactggcatacaggcccctaggcccttacgcactcatctgggtgtctcttaaaagtttatctcggccgagtgtggtggctcttacctgttatcccagcactttgggaggccaagatgggaggattgcttgagcctaggagtttgagaccagcctgggcaacttagtgagaccccatctctacaaaaaaatttaaaaaatcagctggtatggtggtgcatgcctatggtctcagctatgcaggaggctgagggaggaggattgcttgagcccaggagttagaggctgcagtgagctgtgatcacaccactgcactgcagccttggtgactccagcctgttccgtgaatgaatgaatgcttatctcttattcgccatctatgcatccccacataaaaacacatcccattgcaccacacttgagttaccccagaccccgagtttctcgtgttctaggctctggtacacgcttcctctatcggtagcttcgctcatccccctaatctgactggtggaccctgatcattcttcacaatccagcccagatgttggcctctgggagccccttccttgactgtttcagactgtcatgcctgctttttccttccagctctatttcccctgcacctggcctccccatgcagccgtgactgttgggataggtctgccctttctcatagcaggaggacaccttggggcaaggttggcatgtctgctcctgcctgaacccacacagttcctggagtgcagcaggtgctcctcagctgtttgctgcacgcatggacgtaagagtgacagaagcatgtccttcgacatgacgtttttgtacctgaacattgtctagaggctttccagactgtaagctctgtgggattaggagcctgcctgcctcgcactccctggcatccttagtgctttgggcctcacaggccagcggagccctcgtgcgggttccaggcctgctttggtgggagtgctcagtacttttagccacacagagccgtggcctgcaaggctttcggagtacatctctagcacatctgagaatccggaagcaactcagagtttctggaatggatttcacaaagtctgtgaataagaaggccccacaggccctactcaacagcttttttttttttttttttttttaaatacagaagatgctagtcttcaaagaacctctttactcttttactctttttctttttttttcgagacagagtctcattctatcgcccaggctggagtgcagtggcatgatcttggctcactgcaaccttcacctcctaggtgcaagtgattctcctgcctcagcagcctccagagtagctggaattacaggggtgcgccaccatacttggctaatttttgtatttttagtagagactgggtttcccaatgttggccaggctggtctcgagctcctgacctcaagtgatccacccgcctcagcctcccaaagtgttgggattacaggcgtgagccaccgcacctggccctctttactcttattatatagtgatggggtcttgctttgttgcccaggctggagtgcagggatactcactgcagcctcaacctgcagggctcaagtgatctcctgccttacctcccaaatagctgggactacagacctgagccaacgctccccacctctttactcttattttattttatatttatttatttattgagacggagtctcactgtgttgcccaggctggagtgcaatggtgtcatcttggctcactgcagcctccgcctcctgggttcaagtgattctcctgcctcagcctcccaagtacctgggattacaggcacgcaccaccacgcctggctagttatttttgtatttttagtagagatggggtttcgccatgttggccaggctggtctcaaactcctgacctcaggtgatccacctgcctcagcctcccaaagtgctgggattccaggcgtgagccgctgtgcctggcttactcttatcttagatatcacgctaacaagcagctgatttcccaatttacgcagattcaaagcagccaattagaaatgggtgagagacttttgaaaaaaaacgtaggcactctcgtggccgggtgcagtggctcacacctgtaataccagcactttgggaggctgaggcaggtggatcacgaagtcaggagatcgagaccatcctggctaatatggtgaaaccccatctctactaaaaacacaaaaaattagccgggtgtggtggcaggcgcctgtagtcccagctactcaggaggctaaggaaggagaatggcgtgaacccaggaggcggagcttgctgtcagctgagattgcgccactgtactccagcctggacgacagagcaagactccatctcaaaaaagaaaaaagaaaaaacgtaggcactctcataatggtgagggtcatcctgcctcaagaaaagacaaacactatcaacaacaaagatgcaggggccgggtgtgctggcttacacctggaatcccaggactttgggaggccaaggtgcgaggatcgcttgagcccaggagtttgagaccagcctgggcaaccaagcgagaccccatctctacagaaataaaagtttttaaaaaattagctcggtgaggtggtgcatacctatagtctcagctacttgggaggctaaggtgggaggatggcttgaggccaggagtatgagggtgcagtgaactatgctactgctttccaccctgggtaacagagtgagactgtgtctctcaaaacaagcaaacagaccaaaaagatgcaggaacctgagatcccacagcctgggttccctctgtgtgcaagcaacctctcctgcctctttaggccctaagtatgttgtacaatgacacgatggccgagtagtctacaaaaggaaccgtgcgtggactcgagacagcatggacatggttcacgtattccggaagtatttctctagctgtgtagaattttagagctgaggatgatccttggtgaccagctccatattgctttgtggagaagaaacctgagtcctgggaggtcaagtaacccgttcagactcccacaaccagagcctccggcatctgtactgcccagtcagtacagagctccggtaactaggtgcacttcagttatctagagtaggcgctaataacttatttcttgtcagaggccaggtaataaatattttttaggctttgcatgccaagaagtaaaatctaggatgttatatataatgagaggcaacaagtttccatgttttttgttgatgaaattcaaataaggctggttgcggtggttcacacctgtaatcccagcactttgggaggccaaggcgggagaattgcttgagcccaggtgtttgagaccagcctgggcaacttagccagaccctgtctctataatttgaaatatatatttttaaaagaaattcgagtaataactaataacagttgagtgcaagtttttaatacaggtttgttaataagaagaatggaatgatttttgtagggataacaattttgggccaggtgccatgactcacgcctctaatcccagcactcttggaggctgaggtgggaggatcgcttgagtccaggagtttgagaccagcctgggcaacatggctaacccctgtctctacaaaaaaatatttaaaaagttagctgggcatggtgggtagtatacacctgtagtcccaactactgtggagactgaggtgggaggatcacttgagcccagaaggctgaggctggagtgagctgcgattgtgccactgcactgcagtctgggtgacaaagcaagacccagtctcaaaaaaacaaaaaacagaaaacaattttgtttcattggggttctgaattagtgttcccaaacatcaaaatctgttgcaaatatccccgtgtcagtgctcatctgtaatgagattgtataggtgacatctttgaaaatatcttttcacacaaataggtactgccaagttatattggtcagggagcataaattttgatggggcattttaatcattggaagacagcatttatagatttttttttttagattcccctcttgatatttgcctttttgcattattgcattgcagatcagccacttccaattgaaggttagatgagagctgctcaattgtacagttaaatggattttaaaatatgggaatttccttcatacttagatcaagatctgaaaaacgctgctagggctagaactagcagctcaaagtttttgttttttttgagctcaaggtttgagctcaaaaaaatgtgcaaaggtttttcacttgttctaaccttgacagtctaggaattgtatggcgcaggttgacattacttgtgattcatacaatgttaatttcattgaaatgactttaccgcaatataagttttgcatataactgctgttttgccttataattttagattggcctcattaagaaacatcaagtctgcagcaaaagctaatttccaaagcgatttagtatttggtaatagtggttgagggcagttctttcttttttctttttctttttttttttttattgagatggagtcttgctctgtcacccaggctggagtgcagtggcatgatctcggctcattacaacctccacctcccaggttcaagtgtttcttctgcctcagcctcctgagtagctgggactacaggcacgtggcaccacacccagctaattttttgtatttttagtagagatggggtttcaccgtgttagccaggatggtctcgatctcctcaccttgtgatccgcctgcctcggcttcccaaaatgctgggtttacaggcatgagccaccgtgcccggccctctctttttttattttttatttttatttttagactaagagggcagtacttttcagttattcttgttcagaaaagatttaatattcactctgagctcaaaatagtcacaccagactttaccactgctaagctgctgaactgctgtatggtaggccagttaggatattcagcttctatttttgacaaaaatccttaagaccaacttaggttaagtccatgagagcagatactgttgacattcccttgttcgatcacatataatagattcaaattttttgcataatatctgctggtgaataatatagtgaacaaccataggctccaactaagcctttttctgccccccacattcattataacacatcttagtggattccatttcagattgtactaaacttttctcaacttctttgaaaatgctcttatttgtagttgtttcatgctaattcttcaaacttggtattgactccccaagtaaacaacaactgaaaagtattggtaacgtctttagattcatcaagagccaaggaattgcattcttaaaccctcttggtggcttccctgtaaatgcttccaagatatgagcgaatgctatagaaattgcaggaaagtccaaagggctgcgcgtctcctgtggctcagtcttatttcatacctgcaacatcttttaagggaaatttgcaaaagggagaattatcaacttaaaaaaaaaatagccaaggaaacctcgactcttcaaggaagcaaggaaacgtgctctccttgggagtgacattagaggaggcccagtgtgagtcaggacttcatcaccacctggcggaaccagggagccccaccccatgtgtcagtggagatcatgtgctgtcttccctctccaagctagggtttgtcagcagaggcccaggagggagactgaatctcgcctgacagcaatgaactgataccttccttccctataagcaggtgacagacaatatttaataaaatcaaaaaaggctgggtgcaatggcttacacctgtaatcccaacactttgggaggccaaggtgggtggatcacttgaggccaggagtttgagaccagccccagcaacatggtgagaccctgtctttactaaaaatacaaaaaaataaattagccaggcgtggtggcacacgcctgtaatcacagctactctggtggctgaggcatgagaatcagttgaacctgggaggcagagattgcagtgcactgagatcacacaattgcactccagcctgggcaatagagacagactctgtctcaaaaataaaataggcttaaataagattcaggatcttaaagtacccagaatgcccagaatacaataaaaatcaatcactataccaagaaccacaaaactctcaacttgaatgagaaaagagagtcaacagacaccagcatcaggatgacacagatgttggaattaagatatagagaagaatgaaacagatgtcttagaaccgaaatatacaatagtcaaaataggaaactgaatggatgactccacagcaaaatggaggagacagaagagagaatccatgaacttgaagttagagcagtagaaatcacctaacctaaacaacagaaaatagactgaaaaccaaaacaaaacaaatgaacagagcctcaggattttgtgggactaataacaaaagatctgactttcatgtcacccaagtcccaggagaagaagagaaagagagtgaggctgaaaagttatttaaaaaataatggcggccgggcacggtggctcactcctataatcccagcactttgggagacagaggtgggcagaatctcaggagttcattaccagactgggcaatgtggcaaaaccctgtctctactaaaaatacaaaaattagccaggtgtggtgaggcacacctgtagtcccacctactcaggaggcctgaggcaggaggatcccttgagcccggaggatccctcaagcccagaaagttgaggcttcagtgaacagtgattgcaccactatgcctccagcctgggtgatagagcaagaccttgtctcctaaaacaaaaaagaaaagaaaagaaaagttgctatattttgcaaaagacataaatctacagattcaagaaactgagtgaaccccacagaaggtaaacacaaagaaatctgcaccaacatctcagtacagataataaacttcctgggtactctggctattgtggctgtggagcgatctgtctgagtcactcttggacactgctttttaacaggtcaccttggagagtgtagtgttccccgagtacctctcagtccctgtgggttgcgctgtcaggcaacagtagggtatggttccatgagggttttccctcatcttgaagccactaaaccttggcagaggggcttgtgaacctgaatgaccccgctccccctgcagccagaaggtgcagcccctggtgccagagccttgtctaggtggccctgacatgacagtgacagctaaagggttgactaaattacaagttttattctttcctttcttgttactgctttgattggggtgtctgactcaccccaatatcagtgctgagttggttgctcaatcttttttacggaccagaagttgcaaacagtaaatgcaaaactgcaaatacttcctggaagataacctgttccagtgttgcaaatggttggcctcagagagcccttgtgttcttgcgtcattctccctttcagaagctggtgaggctcctgccagtgccccccagcctgtgtgctccctgatttatttgtccatcttgctcagtggtgtgtgggagggactggagctgttgcccttgattgctaccttggtgggaaccagccagctaccgaaattgacagggaatcgtggtcaagctatacatgcatagtttttacccttctctgtatgttgtattttataataatgaaaacatgtagagacctaatttataataaaagtcaggtctgctctatttagagttggggagatctagttggctggtattctgacatgtgcctttttctgtgcctaattttttcttgagacaggacctcactctgttgcctagactacagtgtagtggtgtgattatggctcaccgcaacctcaacctcctgggctcaggtgatcctcctacctcggcctgccacatagctgggactacaggtgcgcaccgtcacacctggctaacttttgtattttgtggtagaagtggggttttgccatgttacccaggttggtctcaaactcctgagctcaagtaatctgcccgccttggcctcccaaagtgctgagattaaaggcatgagccactgcacccagctctgtacctaattttacagatgagaacatgaaagccttctgttggtaaggggtgtgtctggggtcccagccagctggtgtggcggggctgtggcaagagcctggtctagttcttgtttgctgtttggattgatactgtgtttggccccatgagctctgccttgtctcttgttccttttgctgaaggtataaagaagaaactcagagattaaagactctttcagggcagaaggctcacacaggcttccagaacctcctcggagcgattgtagggactgcctgacccggaagagagttgtcagtcaagaccgccagagttttcccatcagagtatttggcatagcagaggtggctcccaaactgtgccagggcactgcagcaaactcacaagtgatcattctcaatgcggcggacgctcaagtctgttgaactccatgcgaagtgctagcttgggacagttcacggttccaacgtgagatccttgctgcattccttcttaggattttacatctttgcgaagctgggtttgcagtggttgttcagacctaactatacgtggaactgttaggcatttttttttggcctacggataccattaaaaatttgctgagataccagggactccacaaacgaaggacatttgggatctgtccagacaggtacactggaagcccaatgtgtgttttatttgttaattgattgattgattgagacagtcttgctctgttgcccaggctggagtgcaagtggcacgatcttggctcactgcaacctccgcctcccgggttcaagcgattctcctgcctcagcctcccaaatagctgggattacaggtgtctgccaccatgacctgctcgcagcaccacgcccagctaatttttgtatttttagtagagacggggtttcaccatgttggccaggctggcctcaaactcctgacctcaagtgatatgcctgcctcagcctcccaaagtgctgtgattacaggcgttagccaccacggccggccccaatgtgtgttttaaatctttgcgcttaaatgtttttgatttctgcacattttgtgttgcacgtgtcataatgcattcaccgattcccttcattcccttgagtagttattgcgccctggattctgcgccaaggaagtgtgtgctggggaggggatggtggagctgaggtctgaagaatgagtacgaagcttcgagaggaggagcatctcagacacctgtcaggctctggggcaggaccgcagaggtgcaag

SEQ ID NO: 954 - DNA, 32744 bp, Homo sapiens
  source 1..32744: mol_type = other DNA
ctcttgaagagggctggtatatttgtgcctgctggaggtggaattaacagtaagaaggagaaagggattgaatggacttacaggaaggatttcaagtaaattcagggaaacacatttacttgaatagtacaacctagagtattattttacactaagacgacacaaaagatgttaaagttatcaccaagctgccggacagatatatattccaacaccaaggtgcagatcagcatagatctgtgattcagaaatcaggatttgttttggaaagagctcaagggttgagaagaactcaaaagcaagtgaagattactttgggaactacagtttatcagaagatcaacttttgctaattcaaataccaaaggcctgattatcataaattcatataggaatgcataggtcatctgatcaaataatattagccgtcttctgctacatcaatgcagcaaaaactcttaacaactgtggataattggaaatctgagtttcagctttcttagaaataactactcttgacatattccaaaatatttaaaataggacaggaaaatcggtgaggatgttgtgctcagaaatgtcactgtcatgaaaaataggtaaatttgttttttcagctactgggaaactgtacctcctagaaccttaggttttttttttttttaagaggacaagaaggactaaaaatatcaacttttgcttttggacaaaaatgcatctgactgtatttttacttaagggtattgtgggtttcctctggagctgctgggttctagtgggttatgcaaaaggaggtttgggagacaatcatgttcactccagttttatttatagaagactacggaaccacgaaagacgggaaatacaaagggaaattctctctatcttgggtttgcctcacagacccagaccattttcacctggaaaacaagcgtcctctgcacctctctttatgctggatctctacaatgccatgaccaatgaagaaaatcctgaagagtcggagtactcagtaagggcatccttggcagaagagaccagaggggcaagaaagggatacccagcctctcccaatgggtatcctcgtcgcatacagttatctcggacgactcctctgaccacccagagtcctcctctagccagcctccatgataccaactttctgaatgatgctgacatggtcatgagctttgtcaacttaggtatgttgttcatttgtttgttaatctatgttattacaaagtggaagttttccctaatggtaaaggagctgcttggtaggtggtcatgtttatataaagacattttctctaactctcctgtttagcttctgttttctttctttcattgatgccttaggcaaaaagtcatatatatatatttaatatgaatagttaaatttaaacacttatagtgtgggtcttttcagatcttgttaaaatttcaacctcgcttaaatatatgaatgcaaaggcaatagtctaaaaacagggaaatttatgaggatagctatgctatgggcaacaataaaaaaaagaagcacttacagatgggaaagtaaaagtgacattcggaagcactttttttttaagtgatttaaagcacatgtaagtatatattcacatactacttaaaaatctctcatctaggggaggcaactactgtaaaaatatagaggtaaaattaaccaagattgaatagcaccataaaagattactatcaaggaatcaaggaagggattctgaaattctatagtaaatatttcagaaataaagtttcaatctaacagttcttaactgtaatgagtaaagtatgttatagctacttgatttttttcacaggcaagaaaaatgtaaaacatgctttagtggtctttatctatacaaaattttccttctatatgagataaaatatttgaaattttctgtaaaccacaacaatattaatgagaaaattttaaaattatgttttagttgtagctggtacttcatggtggtttttaaatactgataatgtcaaatgataatttagttcccaatattccctctcacaataatattatggattaccaatttcaaattattttataagggctgttgttttctttaaatgttttagtaaaaattgaaggtgaaatttactatctctggcagtcaaaggaaaataacatcgaatatattttatgtttgaagattaaaaactctatcaacaaatttaatccactgggaagaattgagaactttatgatgttatagcttttagaactttgttttaaaaatgcaatctgctttgacttaaaattaacatgttttattaaacacttaattaaaaacttcctcatgtaacatctcaaaggaaatattctttgaaaagtcagattatcaacaaatcttaataacacatggatgcttttataatatatgttgcttaatatactctgctcatttgctcttagcaatcctagcatgaaggataaggtacttaataaatcgtacgttttatgttgctagagacaaaggtctcattattaagtgagtaagtcataatttgttgcactaatcaggtgtcctggaggccttttcttctacgtataattaacagacttcacatggaactttttagtcattaaaatatagcttaatttcaaattaatgtgattgcttttacctagtataagggatatgcaagtgtagcttgtggtacattttgctttgtaacatttctaaagtattattcaagaatttaaagtagtttaaatattttaatagaaaaatttcaacctagcaaaatttatatattcataaaccattgagaaaatcaggtcatatcatctaaaatctgacaaagaagcatatgtatgttacatattttaataaacgatagctcagtcatgaatgtcataatatattttattagaattgctctgatcattcacaagagaagtgtaagcatgatttttggatttatgtgtttactttttataaatctacatagagtaagaaagtcaaaaccaataatagttttattcattgattcctataacttttttattattgagaaacacatttaaaaataaatgacattttggttacattgttcagattataataacatagcagtttattagtttattgcctatatgaagaaatacaattattcatttgactctagagaaacaatattagctataagctttagagaaactgtgtgtttatttttatcatgcttgaacttctgagtagtgctttatattcaataacaaactatgttgtttcttctttatttaataattccaaactaaatgtcttacatgaaattactgacaaactgattctgatactaggtgagtttttcttggtagactttaaggaaaattaaaccacagtttaattatcctttgatcatgccttcaaatacattcaagatttatagttgatcactgcttagtaaaaagcttcaacttttgcatttcttttataatcaaataaataaataagcatactcagaaaaggtgaaagtgtaataacattattagctgcaataagagtgccagtgctttttaaatgtaatatccgttagcaaatattacctgtagtttatttcatgttcttataagactaaaaaggattagattttattttttcactgtcttaaaagacatgcatatagttgagactaagtacaaatgagtcacattagtagtaggcaagggatttgtattgaggaagtcacctggatatttaaatatgtgaaaagaatctgttgacatttcccataattagaagaattatataaaaaggatctagtagcatccttttaaaaaatgcttgtgtgttgtccttttcaagtcaaataatggattttccacaggtaccttgccattcagaaattcttttttcaacatagttttggtcacgaagaacaattaaacttaatccaaactcagaatcatgtttaacagaatacctactgtttaaaattcagatgagattagctttatattcataagtgaaaaatagatttgaatttactaaaagcaaaataaaaagtaaataaattgcctaaggcatgcagacatctgaatatgaaaccaaacatatcattttaacctttattttagtgactcgtttattttgaagaaacaaatataaattattaactgtgtgaagagaaatattccttcgatcatattcattattcttaggccacttttatcagtctcatagtattaaattttacagattgaattctttgctttttccctaaaactgttgaatatcagtggaacttttgcttggtcaatataatattattttgttagtaataaaaatgtttttctgtttagttttattttcttttttaaccatctctttgtcaaaagtgctaagtgttagtatatgtattaaataccagtacaagttaaagacatgattagataatttgcttacaatatttatctcttgtttacacaaataaaacatgtagtgtatttctaagatcttttagttagaagccaattttatttgattacttggtgacattatcaccataatgacataacactagatgttttagaggaagtaaaaacaggaaaattacttttatattattctttgtatctacatattcctctggaaaaagttgaactttgagtttattaatggtttttctcttagatgtatttcaagaatacgttttaattccaagcacaaaagtatttaaatgtgttgttaaattttttaaatataaaaacatatttagtctgttatcatgaaagaaaaacgctttcaaaaactaaaccttttttgcctacttaccctaatcattaagttctcttggtactggaaggaaaaaatgctttatgttctcagttgacagatttgaaagacatcattgataatttattattgtttttggctgaatcaagtgcccagtggaaagtaatttatatacaaatctacctaaagatgcctatctatgtagtctctccaacagagttattaacacttgtgtaacataaacacacccataaacacatggaagttttttttgaagggggatgggttggaaggaaagataatataaagccattatagtatatattcataaattatgcctggagtaactaatgctaataatgggtaaagcaacaatcattctgtaaaagttttaacttttgaagagaaaaatattgctgagtgaggagacctttttctctcttcttcaacaacacttcacattcataatcacgaccaacgggattctttttctcctttaaagatggttgattatcaagtgattggcatgacagacaaactctgggttgccagagatagttataatcatagtttaattaaatgctttttttttttttttcaaattgtagtggttactcacaaatatcaaattttaaaagtttaatgagacgtattagctggaactaagaaggacttgggactgcctcagctgccacctctccttccctttcattcttccattttctgtaatatcaccactctccctcctcccttctcatcccagtattttttggcctttcctccttgttcttggtctctgtagccccaggctctcttggcacccctctccttaccactcccacacttcctggggtctgcctttcgtcctggtttgctagaggcttaaattagttgaaaatcaattagttacagtttgagaattgaggtacactctcctgttttctctccagttgagaaggaaaaggttatgatgtgccaactgcagcctccacccactgggagaaaagctccccagggcatcagagctgccctggctcttgccatcccctgtaattgtttctccatcatcccattcttctttgcctcctcatctctccctaaggatcccattgacagaatttaattgtgttttgcctttattttataaaataacatttaaaagggaaaatttcaagaaaagtaaaagaaagaaaaagaaatcaacaatgaacaaaaataacactcatcaaacatgccattcctgtttagtttataaaaagcttttgtgtttattatccttatttaatattctgtcacttccatgaagaaattatttttttttgaaaagagataatgagaaagaataaagagacgaagagtgagatatagaggcatacaggaataaggatgagacagagaaagaaagaaaatatttttgaaaaagagcctgaaagaaagaaaaggaatgaaatgagtcattaaaggctggtttttcagttgtacaggtggaggagatgctgggaaatcctcagtctacctcataccaaacagcagctaattcaacatccccaaccacatcagctcgaggggaaaaccctttcatccttacacactaaaataccgaagtggggaaggagggggttgtctcagtatgtgtgtacaaggagcatacagacaagctactcacatttacagtcataaataatgtagtagctcagctttaaaaaaccacaggttaaaggaagaggcttccctgacgcacaggagaggggctgagatcagaggaaccactgaaagggttggagagaaacaatgaatcccttgttctaagtaatatttatgagtgcttctttgcaccttaagttcatattttattggctgggccgtggggtttccccatttgctcatctcttaaaataatacccttggctaagatatcctttaaaacacactagtcagccctgacaaacagctcatttatttagaggaaaaagggatctgttttgattttgatgtcagattgggatgtttaagattcagctcacaaagtctgacagtaagataaaaataatggtggagtattcacctgactttttcagagatgtttaaaacaatctgcataaccaagtagtagtaacacctagtttgtatgagtcttgaccaagaagctgtggataaatgataattttaaaaggcagaaacaaaatctatgaaaatgtacaatgtttaaaaagagaaaaaaatactatttgtagattagtaagaaaggtctttagtggtttggggagaaaaaaacaacaaaaacaaacaaacaaaaaaccccataaatcaaaaagaatgcattaacctcggcttggaaggcagtgaattaaatacatattacataactcttagaaactaaaaccttgtataattctgaatagttggatgttgaaattaaactggaggttgtgctgttttatgacttctaagacaatgaagatccttgtcttcaatattgtgtttgttcaatttctttctagaaaaaaaattagcaacttttattgttcttgttaaacaggtttcctggagttgttaggaataaagaaaatagttttaaaatgtcaggatcaacagatgtaaatcctatttagattttattcaggactataacacatgtctaaatcaagaaaagatttattaacatgtacaaaatccttcagctattttaatgctataatgacatgaaaagttcaatgttatttgttgttctgactctgtgattaccctttctatataggagacacagccatctccagaatcttcagttcatggcatattactgctcacatgactttaaagttcaattataaattaaatttagttgctttcttttctgtgcttccatggcagaaatagagtagtatacaggaagccagaatgcttggattggaatcccatattccacgcttactagcagcgtgaacttgagcaagttatttaaattatttgtgcgtctggttgcttatctaaaaagtgcagataataagatcaccttcctcgatgaatgttgagataatctgcatgagcagctacataatctgtggaccctgatgcaaatgaaaatgcaagccccttattcaaaaattattaagaatttcaagatggtggcagcagagtattacaccaagagcagggcccttctaagcccgggaccctgtgcaactgcgcaggtcacttgcccgtgatgctagtcctacatgtttgattacatgttgtggcaacagaaaccatgtcccattcatcccttcccgcctgccccacccactgagatgtatcagcatttccagaagaaaagagacagaatgtgcaaactgaattatttaggagagtttaaatgatgttataatgtttatagtgttgtgggcagaggttttgttttgttttgttgcagcaaaacaagggatcatatagtatcttgggatggcagggtagccttcactactcctgggcagggggcatagttaccagaaagctcagaggagagatatgtggggaaggtgccctgacagaaactgtggcattgggagaaagatgccatgcatctaatccttagatactcagcgggggggatacagataccaagggataaatacccagaccatatgctttggtcttccattggttcaccctcactgaaagccagagagccacagaacccattggtgcagttcctaaaagttagtcttttggtgagaatagcagaatagggaaatgtggagagtggatcttgaggtacaaatggaagatatttggcacaagtagataaataaacattggttgtttagtcagcaagtgttctagaattacttcaatttcagtgcaagttactgatatatatgttaatctttgtattatttagttaatttatagtaaaattcaagagagaataataatttagtgtgagagataattacttcaggagttggtgaaataaagtggtaaatataagcatggcatgctgaaagaaaaaatccttaaattgtacatgggtcaataatttcaggtgatatattaaaaccattttagagaaaattgaaattaagaaacaaaaattacccagaaaacagaagcccctaaaacaagaaaaagcagcactttcagatcacaatatgaactgcggactgcaattgccaatgaaaaaattcagtatgggaacgagaagaatatatgcaagtatgtagagcaaaatgaagagcaatatatttttcaaatccctgtttattgtcaattgtatgccatacctcctgagatgatccacgactgtgtgttaaagcttttttgaattctgagtggaatcatatgatattctcacatgcagcattcgcattccatagttaatgttgcaggcataaataatgttagaatgaggtagatagggattattgtctttcttctttgctacctttattctcctctggcagaccatctgtgactcagagaggcagaatttagtagtggagcaggtatgtcagctatttagttctcataaataatcaagcactaaaccttgaggccagagccactccctgcccttcaatcacagagaaacactgaatagaacaactcctttccagtacagtttgtgttttccatcaaatttgctacagttggaaatttcacttatataattattaaaagaggaagagagggtgcaactcagaaactgtgtaggctcttctgcaaataaccttgatgcagacacacaaaagacttatttatctagtggggaagcaatgaaggttattaattaaatatgctttatgtcaaaatttttgtagatgtattctttgctctgggtgaagaagggtcatttggttctcccttaactgttttagtagggtttcagtgttagggttttggagccagactggtttgaattccagctgcgtatccttgagcaaaccatttcacttcgttgaaactatttcctcatctaagtggagctcataatacagaattggagttaagactgtataatgtaaggtcctagacttttgagcctacatgagacaaatactaaattaatggtctcaactgctattacaactatttctactagaatatactatggagatctaatgttagaggaaatctacattcagcctacaagactttgtcaaataaatgccttgctgaaattctgaaacattatgcacataatttttcctctgtctaaaagaaaaaccttgaatttcattgactctttcttcaagctggacagctgatggactctgttcccccactagagtgctttggaaaaggtcagtctatgtcagagccttcatgagacggactgtggtgctttcctctgaggacccaaaagcaacattttctgtgattagctgctgaaaggtgcttttcatactacctttggtcagagtcctagaactattccatggttttactttaattttagatattacctgttccatttccttgcttgttaaggaggggaaactaattagaagccaaggtagtaatatacaattagaagatatttgattgtaaagacatggacagtctataaagaaccctttgaaagaatgtaaaaaaaaaatgaaaagtttttaatgcttattttcataagtcaactcactttgagggttttaatttttaagaagttgattcatgatgaaaatttaggtgtataaacttttaaactctaagcaggaaagtcactctgttcaaataatctttcaatcctggagctttcagtattgtctgtaactcaaatcatgtctgaatttatgatttataatttgcagctattctcattactacttaaatcattattataattttgtttctacttaataccattcagccttaagtattgtgactttcctcgacgatttgtttgggttttttttttcagatgcggctattaaatatttttgttaattatcttgagttgttataataacttataattttttaaacaggatgaaaatgtatttgtttggtctccaaagccacacaaaaggccatacataaactgtggacatcttctattacaggatgcacattgtaaaatcatcacattgatttttgatatttcattatatattgagtgggaaaacatagatttattgttttctcattatttgataaaatgctggaagataagtcattaatatgatgtctcagtctgtttgtgttgatgtaacacaatacctgagactgagtaatttataaggaaaagtttgtttggctcatgattcaggaggctgagaaatctaagatcaggcagcccattcgatgagtgtctcatgctgttttaactcttggtggaaagtagaagggaacgtgagtatgtgcagagacacacaagagagactggacttattacagcctgctctcaagggaactaatccattcccaggcgaccaataactccctccctcccacaagatgacatttatctattcataacggcagtgccttcataatccaagcacctttcacaaggttccaattccaaacgctgccatattgggaatcaactttcaacatgagcttaggagaggacatactcaaatcgtagtgataattactgctagatttttaattgtgatgggtagttattaaaataagtacagattccagctacatatttattgatatattcgaaccaccatttaaggtttttctctttacactttacattaaaagttatcattcttcagtaatttacattgaggaataattttatttatcagaattaagtgagctttttttttatatgtgtgatgcattcacggttatgcatctttaaaaatgggggtgtaccttctgagaaacgtttctttaggtgatttcatcactgtaccaatattatagagtgtacttacacaaacctagatggcatatcctactaaacacctcagctagatggtaaagcctattgctcctaagctacacacctctatagcatgttactgcactgaaaactgtaggaaattgtaacaccatggtaagtatttgtttattgaaacatatctgaaaacacgtaattggttgtgctacattatgatggctatgatgtcactagatgataggaatttttgagctccattataatcttatgagaccagtgttatatatacaatccatgttgacctaaacattgtcattatgtggctgcttatcgtatataaaattttcaggtcttagtatggttgtagcagtgataattaaaggaataataacaacaataaatgtagttcccatggcagagactggactctgtgatttttatgcgttatttcaatttatccacatcttaattccataggtaaatatatttctgccaatgtattgatgtaaaaattgagggtgttctgagggtaaataacttataaaagtcacccagctagtgaatggcagaatcattactggagccatgctctggcgacagtttttatattcttcaccattattctttgctttgtaacaaaattttgaagaagttaaaaagtatacaacttttaacaacaacaataataatggcttatattttttaaaagcatctttatatacgttatgtggtttgatctaaattaccgcagtatatagccctcaaggaagtagatatgatcccacaacacacatctatggaaactggagttctgaaaggtcattcattcagtcatttaacaaatataagctgattacctactattgggccagacactgtgcgaaagactgtgcctgttttactgccaaaatcacagggcaaaggagccaggtccaggcccagaatccttcattcttgtgccaggattttttttctttgctcaatgtcacatactttaaataaatcacacccaaaatctagcaccaagtaaaattaaaaacaccaacaaaaatccctttaaagaattttttttaaaagtctgttaccagttgacagaacctatggaagccttttagtccaaaaagactggagcaaaggtaaaaccaagtcgcagcaaagcttggagagtctgttagaagcctgcttgtgtagctctgggaaattattagtatggaggctccagtgactttcaaggaaatatccgaaaagaaggttttatattttacactggatgctaattgtacattccaaaatataagtgtgtctcaaacattcattgtttgtgttgtattcaggaaataaggatacaagagcattcaatttttcaaaattaagttgttggagctgtctaaatcttacctctggccctatcttacttcttcaattgtgatggataaagattttcacccatattttactgctaacaagactgtatacaatgtttactttgctactgtatacattgaacataatgtagtttcaggatataatagtcaatggagatacaattataaattgaaataaaaggggattctgagaattggtataaggaccactttcatacatttccttgaatctacttacggtattggggattgggcaatgattactttaagttgattgtcgagaaaaatcgaccaatattctatgacttccttactctttcctggtagtttactgtgattgtgaagtaaaaattgcatcaaaatatggatataagtgtactggtacaccatcatagttgttagcgttcacctatcaattcacatcaacaaagcattctatcataaaagtgaaataatagaagtggaagaagttaagaccttaatgatttcttctctagtggatattctgtttgctacagctagcgtagtgcttatgatgtgcaagagagcatgcaaatagcatttcaagtgctaacattttaatttttcataaagtcactcagttttatagatgaagaaattgagaccctgaagtcctttgtccgaagtcctacttcctgtaataggaagaactggattcagagctcaagctattcactgatatgctgtgctgcctttgtcaatgctattgagaaggctgctgtgttgaattctttgtaaagttctatatactttccaacatattatatattgaatttgcactattttcacttcatcagtaagggacataaaatggcataaaatgaaataaaaatattttagaagaaagtctgtaataatgagtttaccaagagtctactccctggagttcaactgttacgggcttttgatagatgagttgtgttgctggccttccaaaggaggcaaatactcatgaaacagaggaaaagaagcactgtgcagacaccaaagatactgacatttgtgacatacaatctaattggtcagtaatgaggagtggaaagattgatctgtgttattgattcccacttttaaaagacagatttggcataaacaagattaacatttggcaaaatagaaaagaggtaaaatatcaaagttgcaaatagtaataggccttaaaagaagggttggagattggaataaagtattagtgagtttaattgtatgctgggtgatttccaacctgctggccggtctagaaggccatataagcagggctgccatgctgctaagtatgagtgccttgcctcagcttctctgaccccactggggattggccagcaaattagtagaaacctactaaagtggaagtttgggctgcaggaacatctacagctgacaagttaggaatctcctactgcttgctgcagctagaaactgacagataacttctgcttcatcttgctagtcatgactgaaactcctctgtgttctagataatatttaataacatcccatatttagtacacatcctttgatttgtagcagttacagccctaatctcttgcatgtgtaaagtgagtttctttccatagctcactcattgcccctgtatcacacaaaagctgaatatattatttctgctccttatgtattttatgaattaaagggtaaggacttgggatatatttgttttccaaaagaaaatatttctggagctacaaaatttctcaaagcaaaatgcagaagtacatgaggacagttcagacccggctatcctcagctcccaataccaaacagagggaaccaaacaatgaattatgaaaagtaggtacagttgttaacatactgacgtttagctaaaacactgaaaactaatctctgctttgaaaagcaaggcaagaagtagctaagagtaaaaatgagcatttaagacatcacctgctgcttcttaaaaattctattttgtttctctctctctctctctttacctttagccactcgtacccaatctaccaatagcccaattgtaatgctagaagtgtgaaggatcttaatatctgatttctaattatttagtctgagacatgcttaggaagtcagatgaacttatgaataagtcaaacatttaatttttattagactaatttcattgacatatgataaaacatgtgcttaactataattatattcaaatctcttggccactttcaatcatttactctttttaatcagagttctttgtcagggtttcctgaaatgaatttcgttgaaaacattactttttaaaaaaattttttgagacaggatcttgctctgttacccaggctggaggtcagtggtgtgatctcggctcactgcagcctcacctcctgggctcaagcagtcctcccacctcaggctcccaagcacctgggactacaggcccatgccactgcacatggctaatttttaaaattgttttggagatgaagtctccctatattgcccaggctggtctcaaatcctgtgcttgtgagatttgcctgtcttagcttcccaaagtgctgggattataggcatgagccaccaaaacatttctctgtccttttcagaggtgttgtctgaaattttgtggccaaataaatttgaactatgcaaagaaactaattcaataggttcttatgttttcaggacaggattcctcagtgtgtttattatgctaatgagcattatgaatctctgcaaggaggatataagttacagtgtttaacatgattgatcattggtatttggaagaaactttcctttatggagaaggactgtttataaaagccattctggaaatacagcaaacagaacgttatgatactttaatttgttgacattgtagtcacttttatgtcaaattaaaaaggagcaggaaaaaagttacaattccattatctagagccaattattgttgatgtttttgtacatttcctcttatactttaaaaatacacctttttgtatagttgaactgtttatgtaaggttgtacccttacttaattcttgatttttaagtttttgagttttctcatttgttcattttctccttatgaatatatttttgatgactgaataatatcagctagacaattcattgtcatatttgcataaacagtattttattattgggcatgcaatttttttagtttttactattgtgtgctgtgttgcaatagctatttttactcatatgttcttaaacattcctgaccagttttttagagtctgttcttagaaaacgaattattagagcaaaaggtgtgaccttttttaatgcatttacacagaattacattgaggagttcctgaggaaaatgaacccaggaacactgataattgaaactaaccagtgtttcaatatcactgctaaatcacttgctatcctatacctttttaaactttttttttaaaattttactttaagttgtgggatacacgtcatgtgcagaacgtgcaggtttgttacctagatatacatgtgccatggtggtttgctgcacctatcaacttatcatctaggttttaagccccgcatgcatttatcctaatgctctccctccctttgccccctactcgccgacaggccccagtgtgtgatgttcccctccttgtgtccatatgttctcattgttcaattcccacttatgagtgaaaacatgcagtgtttggttttctattcctgtgttagtttccagcttcatccatgtccctgcaaaggacgtgaactcattcttttttatggctgcatagtattccattgtgtatatgtgccacattttctttatccagtctatcaatgatgggcatttgggttggacccaagtctttgctattgtaaatagtgctgcaataaatacacgtttaagcctcctgaaaaatacactaaattgcttttcagtaaatttgtttcaatttctgtttgtatgagtgtaaacgttagtattattttaccagaatgaaacctgaattaatattatgtatttccattcttgataatctaaaacatactcttttatttgtgtttcttctgagatttattaatcttttatattttctctttggggagttttaagtttgcagcttatgcttagaaattcctcctgtgactaggtgttaataattatttacttttttttctgttgtttgctttgatctcttttcagccaactcaactcattatttgtaaatagcagtcatgtgaagacatttccagatatttaagaattttaaaaacataccgtcaacattctattttgaaaataattgctcaaagtcatcctataggtaattgctgaaaaaaaattgagaagaatgaggtgtttataatattcaaggagttagagttttagaattaaatgaggtgagcaaatagatttggtctaaataacttgatgttcaaataaccttctataacttaattataaaacgctcaagtatatatgagcaaagaataatttggatggcagagatgtaatacctcatttataacactgtttaaaaggtgttggccaagtgtggtggtgcatgcctgtcatcccagcactttgggaggccgaggtgggtggatcacctgaggtcaggcattcaaaaccagcctggccagcatggtgaaaccctgtctctactgaaaatacaaaaattagccaggcctggtggcgcatgcctgtaatcccagctcttgggaggctgaggcaggagaatcgcttgagcctgggaggtggaggttgcagtgagccgagatctcaccattgtactccagcctggacaagaaaagtgaaactctgtctcaaaaaaaccaaaaataaataaataaagctgtcattttgggattgcagagaaggattactaaataaatgtatacattatttttcaattgagtagtaattgcatgcatttacccacaaattatatactttatagtttagtatcaagtttgatttttgagtcaaagcatttcttttcatggaatctcaagatgttttggaactttttgccatcggcaattatttaaatgatcacaatgatataggatattcataacccacttttggcaccttgatctctttagtatcttctagattgatagttacttctaagggatatgaaagagtgcgaaagtatggctgcatttttgttttggctaaacctggtctctaaatgtaaggttttcattatacatatttatcatcttatcaacctttcttagctttaaacattttataatcatacataataactttttgagtctcaatactgtatcatagcatagtttttaaaatgtcatttaagcaacaattactaatgtaaattcaagtaacatattgtgttagctgcaaaaataatgccactgaagaagcagttgagtgatcgataaactctaaatcaaataataaggtatatcaggactgcatgagcagaagaaaacagtgttcaaaattttatattagtaagtctaggattcaaaaaattgaatgacattgaacaaaacaagtcactatgatcatgaaccacataaaactttacaaagcttcggcagtgtcaactctgtatatggaaagtaataaattaaaatgtttaaggtaaagatgattagaaatgtaagtaaaaattggtagaagcaaaactgtagtgtgaaatctttccataaaattaatactgcataatagcctacacacacacatacaaatgtaaaataattttgtacttaaataatacaattaataatattaaattaaatggtacataatgaagattgtgctttgaaatatattgatatgtatgaaatcatgatttttgagattccatggaacagttaaatcaatcactaatcgggtggtatgtaagtgtaaaaatataaaaagtatagataattaataaacatgtaagaaaatgttcaacactatcaattattagagaattgctaattaaaactaaaatgagataccactacacatcataaaaatggctaaaatagaaaaagaaataaaaaaccctgaactcagaaaaccaagtgcgtcaatgatgcagaccaactaaaacacgtataaattgctggtaggtatgcaaaataatacaaccacgtagaaaatatcttacaattttttgataacattaaacttatgcttgccattatgacacaaatctcagttccaggtatttacctagagaaatggaaacttgggttcacacaaaagcctgtacatgaatgtttatagtgattgtattcacaattctccaaaactggaaacaacttaaacatccttcagtgactgaataagcagtgacacacccattgaattagacttcttggcaacattaaaaggggagaacaattgataatgctaaaacataaacctaaaatacatctagctaagtgaaaaataccagacccaaagggctatatattgtctaatttcatttgtatgaaattctagaataagcaaaattgtagatataggaacagattagtattttccagggattaaaggtggggtgaaagactgactacaaaagagccatgaacaggtaatggaactattctgtatcttgactgtggtggtgatcaccgattctgcatttgtcaaaagccatagagctaatggtagatttcactggtaaaagcaaattacagaggcagattatgccgtgtttacaatcaagtattcataaaatatataaaagagctatttaaaataaacagctatattaagagaggaaattacatgtttaaggaataacatttaaaaaatacttaaaaatttatcaaaacagaaaagtagcagccaaagaactgtatgataaattaatgtgtttggaagtttggtaccaaaagaaaaatatcagaataaatgtatattaataaattaagcatctgattaaacatactccatgaaatcctaaaaggactacatgcaggagtgaaagcaaaatgtgctgagttagaaaacaaaaacaataggattaattcgtctaagggttgttaatttgcaagaccaagtaatcaacaaacttctggtaaacttaataaaaatagaaaaatcccaaacaaataaaaagagaaataacatagtataaatattcactagcactttaatgattactacattaactctatgctaatatctaatatattaaaaatccccccccttttttttcttttgagagaggatcttgctctgtcacctaggctggaatgcagtggcaccatcctaactcactgcagctttgaccatctgggctcaagtgatgcttccacctcgaccttccacactctcccccaaaataaataaataaaaataactaattgaataaaaataaaaacaaataaataaaaatttaaaaaggaagtgttgaaattacaggtatgagccagcatgccccacgcacctcattaaaaatcttatcgagatgtcccaggaatgagaaacataaataggtaaacaatattggtagttgctgaaaatatgatcaaaagcttttttctgttttctaaaggagaagaggaaatttgtcattttaggggggagagaaaaaaagaaacacatcaaatgctacataaattggtccagactattttaaaaatatgaaaaactgcatagtattttttaataaattagcataacatgcatacaaaaatataaaaaagagagtcttttgcatagaaatcttacttaaaattatttgcaaatcaaaatcaaaaatactgtggaaaaatcttaattaaaatacttgcaaattgaaattgagtatttttaaaagagtcatttgtctttatcaattgattttaattctagaaatgaaaggatgatttaattttagggaatctatcaattcaatgaagcatatgaggtaaaattaggaaactaatctgaatttatggcatacctaaaatatttgacatttagagccaatcatttcaataccttgctcctctatgtgacaaaattatcttcaacaataattgtgaaatgagtctagtaaaataaggctaaaaagaaaatacagtgaaaattatctttattgaatgataaatatatatgcatatatacacacatatacatatatgtgtatgaatgccaataaaataagaaaaaaatacagtataaaaaagagacattagattaaccctcttaaattgcattaattttattgaaatgaaaaaatattgatcaatatcaacatcttggtcaattatataagaaatagttttcatttccaaggtttctgcaaatttgtcaatgactttatcaaaatgatctttatatattttgtttagtatcaggatgtccagatctgctaatctgtcttcactcctacttgataaaatcataatttatataaatcttatttttgaaagttttttcatgcacacaacatatataaaagtagaaaatgtcttaaacacaaagaaattggttagaaattcatagaaacctttttctccatcaatttcagaaattataatgcagtctgtcattgtttctttggatttgttgtggttttccagagttttcacatttgaaaatgtttgctaaaatatccttacaaaaaataaaataaaacaatattatatttggtaaaaaattctgaagtatataatggttttgaaattggttgagcttacttagggtagtatttgtgtctctaagtcatgaggtactacatattcctgcaagcaaacagtagatttgatataaacaatgatagcacagtgatcgtaaagaaaaaatataaccgtacttcagttcttactcaccccatgtgtatcgggtttgactgtataaccagcagttctctacattagcttccatggaatacaatgtttattaaaggataaataataaaaatgtgctaattggaaacttacatacatattatgaaaatacagcagttgcaacagcaatttttaaaactttgctcaacacaaattttttctgggaggaatattttgtcattgacactgtttagaattgctggaggcatggggataataaaaagcagaatgactaatagttggttgtattactgtttttaaatcctctacagaaagtgaatctttttctttcctgaacccagaggggcttgctctaaccacctaaccttggtacagcaatgatgttaataggagattaatggcatgcaataaaacttgattctgtttcctattaaggaaagagagtcagagagagagagagagagagaaagcgggggagggggagggggagagagacagagagagagctaggaatagaaagataatttactcatatgataaataatatctatcacaaattagcaacaaattttattttattgtattttatcttattttattttattttattttattttattttattttattttattttattttattttattttattttattttattttatttatgtatttgagatgtagtcttcctctgtaacccaggctggagttgcagtggtgcgatctcggctcactgcaatctccgcttcccagtttcaagtgattctcctgcctcagtctcctgagtagctgggactacaggcgggcaccaccatgcccagctaatttttgtatttttagtagagatggggcttcaccgcgttagccaggatggtctcgatctcctgacctcgtgatccacccacctcggcctcccaaagtgctgcaattacaggcgtgagcctccgcgcctggccagcaacaaatattttaataataaaattatgtctaatgaaattccaaattaaggcaaaataaacaacagaagaatgacagcaaaccaaactagtgtactggttatcactatcaataattaacagaggtctggaagtttgaaatgctacaagttttaactgtatacagttgataatattgctttctttaggaatcaactgaaaacatactaaaattaattggtatgactaagagagcagaaataagactaaaaataaaaacacaatggatttcttctatgtaaagagcactcagagactatgatgaaaatattacataccaatgacagtagaagtagaaaaaaacaccaaaataatagtgtgaaaagtttaattggaattcttaacaagaacatgtaagattttcatgactaaattttatataaataaaaacttgtataaataagttgtgacacaattttctgaatgagaaaagagagatgaaatattgtctttctatttgcatatagatttactatcaatctgaaagtcttaactgaatctttcttggatcgtcacaaaaatatacaaaaaaaactcatcttaaaataaaaatcagctaagaactagtggaacagcaagtttagtaattttcctaccaaattttaatgtacattttaaagccctactaaatattttaatattttatatattgctataatagaacaaattgtatatagcatgcttcctgaattggatagattttaatatcatgagagtagatagatatactaacagaaataaattcattttactaataagtgcttggcatataaaaacaatactttggggggatagaataggaggcatgaaaatttgggctaatacaatttccttctaaatttactgaaaaatgagaaggatcttcaactttcttgcagagtcattcactcaagatacctttgcaataaaataaacttcccaacatctgacatggcccatacttaaaaggatgcttttcataccttttaaggaatcttttctgtgatttactagagggaatgtagattttttttattatcaggtgctttctatgacatctaatcagagtattaacactgtggccatgacaagtgtttaaaatttaaaagtacttttgtaatacttaatcctcttaagttgatttttatttttaccgaagttatacttgcacatggcctaaatcatgctataaagttttgttaagaaaaacagaagttcactttattttccaagtccacagattcctttgcagttcagtggttctactgcctattcctctctccagaaatgttctagtaatattccctggggtggaagccagctttccacacttcttccagaggtactaccacctgcctccatgggagaactggctctggacaaccgctctagtcttgctttgtctactgctcctgcctatctcccttaaaagcattagcttctctcccttctcctgtgacatacatagcgtattcctcactccatgacattgtcataggactgaaagaagccaggaagggaagttgtgtacaagtaagctctgttttctgttttaaagcgcaatcatccactgaaagaaaaaatagcacagagacctgtctagctgcttagaatggggagaagaaaattaagagaaaaaaaatgataaatagcttttcttttccttattctattaaagtaaaaaaaaaaaaaaagcaaaacaaaacaaaacaaaacaaaaacaaaaaacccacaacactaatattttgtgccactatgctctttgctctaaggaatataaagtaggatacacaaaactgcttttaagaaattcagtctgttagatcaaaacagtaactttggtagtagctatcttttaccattcaactgctatgcagtgcagaaaatgctagatggtatacaaacatttcatcacttaaagcattctacatcttgtaaggtaaactgtttattatctcctgtttgcaatgaggaaattgaggtttggagaggcccacatttacacaactaatgagttaagaagatgggactggaacctactttcttaatcactatgctaaacagcctgcagatacacatttagttgatgctaaataaatatttgatgaaagaatttctaataaaagacagacatggcttatgatgaatggcagtgcctttatcaaataagcattactgtgaatgctttgccagaagaggaaaggattactgtgaggaggcagaaggtagaaaatgtgcacaaagtaaggcttacactggataaaatttgtgacagaggaactttgtgggataaagtaataacttgagcagtggtgtgaatatataaggtatgtatatatcactggggcccagcatccctgattaaggatattaaatatatcctaggtagggatctatctatctacctctaatctatctatctatctatatctatcgatctatctatctatctatctatctatctatctatctatctacctacttacctaactacctatctataaatacacacataaacttttctatcaggtaaatatttatgttctacttgacatttgccaggcatgtctaagcgatttatatgtattagctcatataatcctcaacaacaaaattacaatataaatactatgattaatccctattttacagatgaataaaagctaaaagtcaagtaacttggtaaaggttgtgcaacttgtagatgacacctgagatttgaatccagatttttcaaggaaaggtgatgtattagagataaacatgaagtgctgttcttggtcaaaaactaaaaaagtatggccctgatagaccttgaaagatactatgtatgcaaaggacttcaaaatgctgtttaagcacaagtttcagaggaaacaaattgataggtccaccagaaaatgtactgtaagtttaggttttattagtagaatagattatcaagggtaggatagaaatagtcctcatctacatgttgatcagagaaatctaggatgattttcattcacttctggtctccataatttaataaatatatagagaaagtttaacatgttcataggaggtaaatgcagggtgtgagggtgttctaaattatatattaggaatgcttgaaggaaatcttttaaaagcttttcatcttacatataataaaattcaaactcctcactctgttctacatatccctaaataatatctattttggctagcccttttacatttttcctaactcttcctgcagctcactctgctttagtttgctccttttgctcttccttaaataagacagtgtccttccacagggcctttgcacctgccattcacactgcctaaatattcctctccaatctatgtgtgttgcttactctcatgttagtaaattgccagtttttcagagatttcttcctcaatcatcttatgtaaaatagcattcatattactctctattcacttaccctggtatatgtgtgcacatgtctgcatatatgtatgttcatgtgtaggtacgcacatacataagaagacctttatcagcacctgatattatttatatattcaacaagtcttagttcttgctgttacagttttctccggtagaatatgaactctataaggatagggactttgcctcttttcttcactcctatagccccagaccacagcagtgtgcctgaaacacagaagggtcacaacaaatattgattgaaagaataaatgatggaccatttagcttcaagaagaaaaaaatgcaatgaggctaattgttatcttcaaatatttgaattgcttttgcatagaagtgtgattagacataatctaaaatagagctaaattaatggtaatcccatttttaataacagtcacagtggttcagagatgaagtgtgtttattctctgttactgaatatgttcaaccagtgacagcctaatttcttaggtaagatttagaaaggatcatatttggactaaatgaattgtaagagctggtctaatcctgcagtctttgattttatgactggagataagggaaaaatgattcctgctgcatcctttgtcccacctgatacctggctcatatttagaatcatagcattttagggctgacagagactaaagatcacatagagactgaagttgaaaaccaggagatgatattatctttctgcaacaaaaccaactatgatcatccacggaccacagcataaactcccaactcctcagtcatcaataaatatttattaacctctaactacttgctaggcagtgttttcaaccctgaggttacagcagcaaatgagataaacaagaactttcttttcattgtgataccatttatcatatcgtagctagacttacatgtatgtgtataaatgtatgtatatattgaatatatgaataatatgaatatattgaattataagtagtatatcactcatctaaattttgtgtgttattactaaatggaaaagatagggaatcaagtgtagtgactgggaaacagtgttttctttgtttacaaatttgcattcttttggcttttgaatgattataccaaagtgacagctgttggtcaaccagaaaccaggagtcagctgaatttttgcaggatatttattcatacattagggtggtcttccaggaaacagaacaacaaacagaatattttacaggcagtgttatagaaatatacacaaagaagcattctggttgaaagtagaaacttttgacctcacacagggaagtctaaatgtaacttaggctacaccagcagttttgactaggaaagtaaatagaagtttttaaaaagttgtttttaaaataatggcttaaaagattaactgtacaaattaaaatccaattaattatccttttaaggaaaattaattgaagtagagttaaaagcatccttaacaatattggtgatctatatgaaaaagctataggagtaaaagtgatactattttccctagtagtccttttaaaaattttagagtgcaatttttatttttacaatattgagacatatcactgatattttgatggctaagatactctacagtaatggatattctacacagtggagaattgactacattttataaaatttctgaccaccttttggacattcctgtagatgaaaaaatcaaaacctagatactaaactcacttaacataaaagtaaaaaaaattattgcatttttatatacattgatttttttccattaatatatttgtcattgaagtcaatgaataatagcactttttttggcccaggaatttaataagcatcattttcagttttgataaataatacgactaacggtaatgcaattgtatcagtctacctttaaggccgttgcattcctggtggtgtaaacctatgatcacttctgttgtatgcctacattactttgtaagattaattttgtattgatgttttcaagacagtgagggtaagtaggacacattgcatacaagttttgtctcaggataggaaaaggacacgttacaaacagcataaaatgaagtgctgggactgccctggttgagaatgacaggacaagatgagaagtcatggatatttatcctgggtctggcaaagatgaccacaggggctttaatgtattatggaatgcaatgactttgaatttcagttccaccactttctaagctgtgctaacttgggcaaacaagtctcttggaatattatattttacatcgataaaataggaactgcagtgcctagtctatgagataatggaatagagggtatacaatgtttgggactggtctgggccccttgctggttacccttgctggttattttcctttttttttgaaattttagagcaataatttcatattgaagccactttttaactataaatatttgcttccctgaaatgaaaaccattgaaaaatataatctacctacatatgattataaaatatcacctgaggcatatacataaaaataaaaagaataaaaaattattaaatattatatatttgaatatataaaacttgggtattactctggtggataaaacaatacaaatatcagatgtttgcatctaccagtaatgaagatattcaaatttaagagacatgatgtcagaacccattccattcaagaaatacatcaaaatgaaagagcagacattcagggagatttgagcatataaattagtgtctggataaataagaaactgggtctgttgcacatgaaagaggatactaatttgtgtgtgaatatgagtgcaagtttaattgaagaagaagtacatgacaagagaaatggtctactagagaagttgagaaaatgagagactattatagtttttcaaatgagggtattaagtaacgctaccacgagcacttcaggttgccatcttttctaaactactttgggtggcatctctctctaataatgtaagtgagaaccatcctgaacaactaccatgtgtcttcaataacaccaaataaaatattaaccaaatgaaaattatcaaatcaatatttatatttccctttctattttatttcctatctgcatgtagtatttgagttgtacatttcaagacaatgtcttggctccacttatgctttgctctccaagttgaacattcactgaattactggtattttcatgtacattcttgtaaaaactcttcattattattagcaactgaagaatgaacaatttatatttatgggagtttagtctagtgggccattcaaagactgtgtggggcctgagaaaataaatttttcactatgagggactcattagaaaatagcacttgctcttccagctaaattccaagtctctacatagttccaaactctctctaggagacagcattgctgcctccaaggttttctgtgccttagaaagaggagcgggagtaggagtaggatcaggatggagaagaaattggatttggtgttcttgttcccaaataccttcctctataaaagtatgggaataaggagttaagaatacctgcctaattgaccaatatatgttttttcaagaagactgacatgaaggaatttgataaacttgagtccagggggttcatggtgtaacctccaaatcatagaaggggagaagcatcacaacctctctccctgtataagaggaaccaattctcaatccactgtgtttccttcaaaggcttcttttatggtggttcaacttcatattttaatcaaggtccatatgttggatattaaagtaattttaaagtgtcagtacaatgttgctatcacccagagatctgcatggtaaataagaaacatcttaaggtagtaggagacactcaccttaacagtaagggaagtgttacatattcacacaatccatggaaatcccgtcgccttgtggttatgtcactacatcaaagcatccagatcattttttttttcaagagttgctccatagacccattgtaggttccaggtgaatatgctgcagagagatttagttccttcagatgtcaagtaatttgtatggtaaaatcatatctcagaataattcagaataaagttccatgtttatttttcattgtctcagcacaactgattagttatgaaactgaaatttctcggcaaaaaatttaaatctcattataaatgtccattgaagtaagtatgacagctctgtttcttattatgcacatgtgccatgtaaagatattagccataaaatttgctgaatgtcctttaggggacttcaaattttagtatgtttcaaataacttaaagaacagcatttgtttatggtttttcatgtgtatagacaataataaatataactgatagtcacgtacatggtgaattaaactaaagctatatgatataaacaagttgtctttttgtttttgaaatgaacttaaaatgaattaaacatgtcaaagtcaatatttcaaaatatacatttttagctaaacatttaggtcttttggaaaacattttggttggttctaaacaacattattactttttttctagataagttttatttcttgtatatttcattgatatgaaattataagtattcttagagtttcaaaactacttatggcaagagttaaactgtgtatttaccatattttaaaggtcaagaaaaaaattttcagaagataatgtgatttataaaaattttaataaaaagcattggtattcctattattgaattcacattgaattttaacaatcagctgtaaactattttggcatctcaagtttggaaaagaaagtaatctgttaatttgtagaactcataaaatcactctcgagaaaaaaatccattataagaaaggaaatcacttctaagttaaatatataacattaaaaataagttcacaaatatgcgtaatctgttgtagctataaaattgtatagctttatgatactatatcttccctacattgatagtttttggttttaatttaaaaagcttgctatctttagattgatgtgttaggaaagagaatctgccaatgtttttatttgattatccaaataaaaattagattaatgaggcatgatgacagcagcacagttaaaagaacagataaatcatcagtggaccagcttcaaactttacttgcttttgctcttctgaatataaaatcttagtgggggaggtggcttaatctagaagacagaacaatcaactcttaggctcatgctgtgttaggataaataatatcatactttgttgaaagggtgggtggaaagtttattaaactgaaaacaacccttcctgtattataaatacagattcatattcaagcttctccctagatcattcacctttagtgtatatgttcatagagatgtgaatggagctaagtttaacttttcatgaaaaatcatgactgatacctagtaaaatttaaggacaatttctctttgaaaaaacaagaatgtcataaggtgtattttaaaattatttagataaaacatctttttttgttcaaggcaggataataaaagtatgaattttgaagtcaggcaaacctgcatataaatcttggctcaggcactattaaaaagccttattaacttattcagcacaaatttattaatactttgggttaaagattgcatttgatatgatagtataccagaaagtttctcctatttcagattattttttcccttaatctcagattactccaccataaaattggaataataatagatctatagttgctttttttctattcctaaatgagtgtgcttatagaaaaaccgtttagttctttagcgataaaggcagcttaatctatatgaaacacagcctcagtgtgttacattacagcagaaaacaacataactatgaattggaggaaaaaaaactacaataagtatgatcagatggttaagatggtatgcaagtatttgaaaactgagatcccaaatgtcattatgaagatgtattcttaatcttaaagtagtttttattgacttcagaaatgtcttaattatctagtttataaaatgcttaaatatttaaaggaaactttaaaaaactgtatgcctctatgaaacaatttaatgaaatagccaggctgctttaaaagctaattacttatcagtaagtttataaatatatatatcctaacttatgatatcagagaaaaacgtgttttgcatggtgtaatatagccatgcaaattactcttataaaaaaattaagcaaactagaaaaaatcttaatgctttattttatttactttttttgctgtaaagttttcataagaatctgtttcaattatagggagatttagtgatgtttattcttaggaggctgcatctggtgtaaacaagcaatcagattcttttcagtctcacagcaaagatgaagcaattaaatgggtgaattgaaataatattttacagttgatatatgtaattttagctgaaatatttaagaaatatataaatgtgatttgctcttttgcctgtggtagattaattttaga

SEQ ID NO: 955 - DNA, 20497 bp, Homo sapiens
  source 1..20497: mol_type = other DNA
gcgccgtcttgatactttcagaaagaatgcattccctgtaaaaaaaaaaaaaaaatactgagagagggagagagagagagaagaagagagagagacggagggagagcgagacagagcgagcaacgcaatctgaccgagcaggtcgtacgccgccgcctcctcctcctctctgctcttcgctacccaggttggtactggtgactttttttttttttaagtttgattttttgcccccaaccacttgggaggacctaaatcaattttaaaaactcaactctcctcttttggaggttttctaggggctgagaggacggtcccgggaccggtgtccccgagggagggacttgccctccaagtcgtaacagtcagccctgggacttgccctccaagttgctcagccagccccggctcccgcgagccgggctgcagggacgtccccgagagccctgcgggctccgcggccgtgtccccgcgctcccgtgcgggtctcgggtgcgctgggcgggcgggcggcgcgaggggaggttgtgccactccagcaactcaggggctcatccaggtctcccattctctcccttgcaggtgacccgaggagggactccgcctccgagcggctgaggaccccggtgcagaggagcctggctcgcagaattgcagagtcgtcgcccctttttacaacctggtcccgttttattctgccgtacccagtttttggatttttgtcttccccttcttctctttgctaaacgacccctccaagataatttttaaaaaaccttctcctttgctcacctttgcttcccagccttcccatccccccaccgaaagcaaatcattcaacgacccccgaccctccgacggcaggagccccccgacctcccaggcggaccgccctccctccccgcgcgcgggttccgggcccggcgagagggcgcgagcacagccgaggccatggaggtgacggcggaccagccgcgctgggtgagccaccaccaccccgccgtgctcaacgggcagcacccggacacgcaccacccgggcctcagccactcctacatggacgcggcgcagtacccgctgccggaggaggtggatgtgctttttaacatcgacggtcaaggcaaccacgtcccgccctactacggaaactcggtcagggccacggtgcagaggtaccctccgacccaccacggtgagtgcgcccggggtgccggggctcccgccggccgcttcagccgtcccggctcggggaggtcgggagggacctgagggcggggagaggtcaagcgaaagcccccatctgccgttcctggttcatttacaaaaaaattggggcccggaaatgggcgaggaaggcctctggctcgtcgcgagagtgtgttttgaaagagtcgcagcaggcgcctctcccggctggtggccctggggcctggcgctcacctggcgggcgccaggccgcagccctccgtctctgcgcggctgcaggttttggggtggggggtctcgggatgtccccaagcgcggggtgccctggctctgcctccgcgggtccgggctctctgggcccggtagccggcgccggacaagcacggctggaacccggctcttccaaaaaacctggcgttccctgttacccgctagctctttctaggcgggtgggcggggtggagggggccctctgccagcgtccctcaattcgcacattttcagaaaggccccagagacctatttattcacacccttctccttgaccttttcccagagctagtgcctttggtttttagacaggtctcttacctcctggcttcaggaatggaattctgatgctgaaggggtttgggggggaagacccctgtcttaagtttgagggatctgagatttcccagattcccggctgcacagaattttcttgcgtctttgctttcaagtcgcctccttgcctgcaactcttgccttactctgtctctgggtactgccctccattagcctcccacctaagatgtaggatacacccccgtttaaataaaggcaattccagtaccacctctttctccctttcacctggagaagttcaggagagttctgaaatgtaaaaaaagaagaccaggcctgtgtagtttgaggaaaaaagatcgaacactttccagctctaagtttgttcctaaagaagaaacaggggtaaaacatcgggcagaaaaagtgtggggctttctgagtccagccagaccgaattctgccctgattcccctactcagagcctgccttgacacggatgacatagcccctccggcagcaggcgtcctctaccctgctgtcgccaggttttaaacaatcgtttctgcggatggggcgctctttgcccacgttctgtgcggatcagcagttaggtggaaatgcggtagaggcagacttaatattatttactatactacttcctgcataatatgaatcttgacccttggtgttcagagaactctctttccctctccactcccctccccttcctctcccttaagattttagtttcagtattgttcttaatggttgaatcgaatgtcaaatgctgaggcaggtactggctttaaagatcaagaagtgtgtggatttgcacttgctttttaaatgtacccctcagagtgtatgagttacagctaccttaagattgtgcgttttaaatgaaggctaatcagactctgtgtctgagtcatctttcatttaaaatatacacatcaactggaattttgtgtcttaggggctcaggtgaaaattcacccatggcactggtgggatcatagctttattgagggtgcatggggcttacgttatctccttctcctttaggatttgggagggtgagaaaagcagagaaaatggccatcccagggtccagccttgggaactttctccaacagcccgagcaatgaaaacgtccctgcaaatcccattttaggccttttgcgggcagcctggccgtttctgagcaagcactgggttaggtttccggaaactaaccctgaaagtctcctgacttctgtcccaaggcctctccttcctgtatttggtgctgggagctgggcctgactccagggtcgttttctggtgtggagcagttgtgtggccgggctccatccttcaggcctcctcactcacagccggctctcttatcaggctggctgggattaagtccgagtcagggaactcagggccattgaaggaaacccataaatcaagtcaggttctagagagagaccttggggaatgtgatttaggcggtgtatctggagaggccaaataagcaaaggggcccttctccccctctgcagcaacctctcgggtgtcagccacaggcccttcattctgctacatttgatgggacatccctgtgggagagatgggtgaaggattctgtccccagcctgacccccaggtgtgccaggcaggtactccggggaccgccaggatgagagagtgggcctgagcccgggcttttgctgaaaaggaggccgatgcgaggtagagattccccaggtgtccctgacggcctcccagggccacactcaccctccttctctctcctgccctttccccgttgccccacagggagccaggtgtgccgcccgcctctgcttcatggatccctaccctggctggacggcggcaaagccctgggcagccaccacaccgcctccccctggaatctcagccccttctccaagacgtccatccaccacggctccccggggcccctctccgtctaccccccggcctcgtcctcctccttgtcggggggccacgccagcccgcacctcttcaccttcccgcccaccccgccgaaggacgtctccccggacccatcgctgtccaccccaggctcggccggctcggcccggcaggacgagaaagagtgcctcaagtaccaggtgcccctgcccgacagcatgaagctggagtcgtcccactcccgtggcagcatgaccgccctgggtggagcctcctcgtcgacccaccaccccatcaccacctacccgccctacgtgcccgagtacagctccggactcttcccccccagcagcctgctgggcggctcccccaccggcttcggatgcaagtccaggcccaaggcccggtccagcacaggtaggagccagctcttccctggagccttttctcctccctcctccccttttcctcaatccagggccgcacccagagggacccctcaggggagccggggtgtcccaaagcctgctgagatgccattcttcccattcttcctgccgggaaggcactgcatgtcctcccatcctagctcacgcctggcctcggaagcagaggggaagtgggatctgatttaaaaccccccaatgagctgggataggaaaaaagacaaacaaaaacaaagtcatgccctcttctgcctgtcgcaggacttctggattgggctggtaacctttagtcagtttccaagaccaaatggaaggccgagggaataattcttgagtgtttcatgctaaaacgaaacctcctcaagcctaaacaaacacaggtccctctatgacccctttggcctctgtcattctgactgttcctctcgctcagctcaaaggggaccacgcagtgaggacagtcctttattagacgtgtagacacaaagtgtgtgtgcatgagcctggccaaagctgcacgcatattctctgcgtggaaaagggggctctcagctgaactgggagaaagcggtggctttgcattggggaagcagagttgaatgaaaatcaaatgtcgcctggcccagttagttacctgcagcgtctcctagagctctcagtgcagtcaggggcaggaaaccgtattaggacatattgcttggctgagctgcagccagaggaggtagaaaggaacggaaaagtgctccaggtgtgtatctcagcttcctgtgctctgttcctttccaaaatgcaaacgctgcctagcagcacgctgcatttttattcagttggtgtcattacttgcatgaagaaaaaccccacacaaaatactttggctttaaaaataaatcgatctatcaccaattccatttctaaacaaagtaattgagtcaaaagagagctagggattctctgatattgatttaactgtattattagacagggtttggtgaagattttgatgtctccttaggcgtgtccatttcagagtgggcatctcttctctgatcggctccaggtatcttgcctccgctgtctctctacagatcctatatagaaagcaatcgtgaaaatcacttgtcttttagggatgagatgagcagccttgaaaccgagctcccaaagctccggtttgaaaaacttcagagggagtactctgggagcccagtgaccatgagatcagttttcagggtttttttccagggtgacattcactccgactgcctgagcaggactgtctctatttagttgatatgttttagctaatccaattattttcagactgctgcacgcgacagttgcattgtttatcctgagccaggaactttaatagagtccggatgcggttaggctgacagaagaacccagacctgcatgttcagtacatgaaagtaggcaggagggagagggaggcaggctagctggtggagtcaaaaagaaagcaagaggccgggagagctggaggcacaaagtggccacggtgcctggcaggggctgggcttgggggtggagggaaggattaagaagtggggtgcagcttgactcagaaacacaggctggggagctgaatcgaaagagagcagacctatgcattttgaggttgtgatgggatttcttttctttttcttttttttttaaagttctcttttctggtaaggctatgaggttggggagagctcgtggtatctgaggccggcgtagtggtttgtgcggggggaggggacagagtgacttttccaagatactctggtttctttaccctcatttccgtgtttgatttctccccctcttgtgcacactttctgccttaagtttagtcttttctttcctctcatttctttccataagactctgaacatggaggggagaaagagagggccgtggtttccctaagccagagctaggaataccgatacaccgattttggtttttttggcgaggaggagaggaggccatttcaatttggcctttttacttcctccttcttaattcctttctcacagtcgtgaaaaccgagaacagcacacctggcaggggcggcgagcgagctgggacttttgggagtgtggaggggaagtttcgagaagcccctccttttgcagggggtggaggtggtgggaattcttcaggaggggattctcttggttttagtggttgctctctctctctctctctctctcttttttacccctttaacctcttctttgcaaatgcatttgctgaaggaggacacagagaagagagagtttttggggttgtcgctggaaacggttgaagtcgtggttagggcacctattgctgtcttaacgcctgggctttcggggctgggacgaagcttttgcaaacaaaagacagagtctttgtgtccagggccgcttcttagctccactgccacctttccagttgggcatctccctccactgtcatctgatcgagctcctgccctgctccctaccccctcccacagcctggtttaagggtttcaggccaaggcggagcaagaggcatttgccagcagctgttgaatgtcaagaggcctcgccgctctgtggttcttgtcacctaagagagaggtgtctgcctgagcagctcacaacaggcaggggtgaggagaggggaggaaagaaggcaggagagagtcagggcctccattaggaaaactggctgtttgctgaagtgacagaccagaggcagcaaggaaaaaagaagaagaaaagcccataggaggcaatggcaaccttgccgagtgaatcaagacagaaaattaccctagtgtgcagaaccttgttgaagaggtaaccgttgctagctttcaaggtgtttctgaaaaggaagctatcaccctccccaccaccctgcaaatgagaggaaatcagactgatcatgtcaggctgggaggtcccccagcaccagggtgcccaggagccgggtggcaaccacgctccccgcctccaaccacagcggcctctcctcacactgccctctgcccagtgcccaagtaggggaggagcccgagggggtcccctgtctgggcagggtggggagtgggcctgcagtcctagctgggacagggccagtgctgccccagaaggggctgacccagcagccaccagcgacacaaaaaggcaggcctgcggcctggcttgggctgcagccggttactcgcccactcacccttcactctttccttccagcctcccccacatccagtctgccacatccctcaggcttttgaccccaactgaaaggtgtctgggtgtgattcaggcctgagcctttttcaagaactgagaagagccgttgggtacttaggaaggcgcctttggcatgcactgcagcgtgtttgtgtttaatctcaggggttctggggcacagcaaaggctctctggggaccctaggctaagaatcttttggaatgtggagcaaaaaaaaaaacctctcttacatcctcattttttttttttttttaaaaaacaaagtagacaaaaactagtgggcaccatccctgactttcaagggtgcaagaccctcttccatttgcaaaagtctttaactttcctgaagaacttacccctggagagtatcacaggcccccaagtgtgaacccccctagttccctcctacttgatctggggctttccaaaggcccaataggtcccatatctgccaaggcagatttttcctccttttaggggaatcaaaattctcaagcaccctactgggttctcttcttctaccccagtggtccgggcaggttggaggtcattaattactctcttaaaacaaaacagtcttcagagctcatttttcttccctacctaccctccggggtcctcctctgggcctcccctctctgggggaccaacttgagttaagcctcctgttcctgcaaggaaggggagtcctggctttctctgggcacccagagaactgggcgctagagacccgtgtgtccctgggtcccccaaaaccaaggagattctcctagaaagcatctttctcttcctcttgcaaagttgaaatcagttagccaactcccccatgtcttgaaatggtaatttaagggattcttccaaggagctttctgggtgggtctgggtcgctttccagcctgggctgagggagtgaatgctgctcagacttcctaccggcctggctggtttttcgtttattttgtttgtttgtgtttttgggaaaagagaaactgtaggcaggccttggttactgagcagccaccccgctttgttaacttgcctcttctcctgatcttcctctgatcggcttcactctgtcctcccaaaccttcccttttcctttttccctccctccccctcttccaggttccctgcctaaagtttgcatttcccccttgcaccccctggctggggtcatactttaacttcagtctccgtaacagcggctggaaagctatggaaacccctgctgggtcctaatcgcttcctttccagccagggacatttgcagtttgattggaagtaaaatctaaaaccctagctagtgaaatcaatcagccgattgatcaatctatgcatctatttattatctgttcacctatctagccattgatgaatccttcctttcccccatcctaatcttcattatttaatcaatctctatagacagacccatgatgataatgggtcacctttgtcttcctttttttcctttgagggaaatgaatggaatgtttgccttttgccaccatccagggctcaggattttctcagggaagtatttgtagctggaatctgcattcctccttggtcctgcccgatcttctccatcaagtcgggcaagccaagaacagggttctgttgcaacgatgcatctgccccttctgcgggcgcctccgtgtgtgtcgggggaacggtcatgccaggacagcattccccagctcaactttggagcatcttggaaagaggtgggggtggacacgctccccaaaagaggagggagaaggaaaaaagttctccattttacgtttctcccccagttccaaatgctgtcagctttcctgcgtgttttccttccctaagtggcttatctgtgcttttgtttccagaaggcagggagtgtgtgaactgtggggcaacctcgaccccactgtggcggcgagatggcacgggacactacctgtgcaacgcctgcgggctctatcacaaaatgaacggacagaaccggcccctcattaagcccaagcgaaggctggtaagttctcgggaagggatggattccatgctgaccattctgggtttctcatttcctctcttccggaaggacagctttctgcaggaaattgacaggatagcctccaatcgtgtcagctggcttgggacagtttttttttttttcctttttctttctttcttttcttcttcttctttttttttttttttttcaaatttgatacacagaacagctcttttcccctctttttccccatccatgtttcttaagtcgcttgtgaacattttaaggagactgaattcttggttatcaaatctgcagtgtattcctgaatagaataatggtatgaacaggaccagagcagctggtttaagtgcactgatgagcaccgtttgacagatagagacatttagtatgaggacggaatgttccagaaaccatccagaatgggttcctgaagttgtggcgtgtggcttcccaggaaggattacagactcagtgcaatggatggatttgttatgctaatgcttcaaaatggttggagctgattaaatgaatttcagaggcttcaccagcaaccagtgagcctaatgccactttcctcctttcttggtctcagcatttgagaactttccacaggcaattcctatgggaaacgtcgtgtgagtcctctcatacctggcatttggtcttcttttctctttgaactactaccagtaaggtgatagttttttctctcctctctcattattcttttaaaaactttttaagcatgagggatccttgagaaaacctggctctgtcaagcatttataaggaagacaacttataggggacattcatttgcaagctcctctttggaagtttgaatagtgaatgtatgtgacagacaaataacaactctagccacagctaagagatcaaaatgctttatgtggtgctgacattcaccaagtcgagatgggaggaggggaatttccccacgcagattaatggataaattagcatccatcaatttctaaggaaggaaaaagaacacctctgtattctttttaaagaatactttgccctccccatcagattgtagtgcaactcaacacctttcacatcctattttgaagaaggaaaaactttctttttttttttttttttttttttgagacagagtctcactctgtcacccaggctggagtgcagtggcacgatctcggctcactgcaacctccacctcccgggttcaagcaattctcctgtctcagcctcctgaatagctgggagtagggacacccgcccccacacccggcaaatttttgtattttcagtagagacagggtttcgcctttttggccaggctggtctcaaactcctgacctcaggtgatccaccgcctcggcctcccagagtgctgggattacaggcatgagccaccgctcccagccaaagaaggaaaactttctagggatggaaatgtccacatgactttaatctttgacaatcctggatatcgaggctttattctttctgatctttgcccccttctccaactttctcaaccttcccccacctctcctccagcagtttggtttttttttttttttttttttttttcctttctctcatgtgcaaagctgacttcctaggaaaaagctgccggatatctgagcactggagataactcataaacaacaactcagcttccccaacctaaacaccaagatgtttgaacgtatcagaacaagaagtgtttgaaaaaaaaaaaaaaaaaaggctagaggtgttagtgcagaatgaatatgatcacaccacaaaagaatgttttgaatcactcaaaaacctggccttagtaaaaaaaaaaaaaaaaaaagagagagagagagagaggaaaaaaaaacaacaaacaaaaaccttcttgttaaaatgtgtcttggtaccattatagttgttttttttgttttttctgttttttttctaataaaagtaaagaaggaaaaagagggattaaaagtctcaaggcatgggctgattggtgagcaaaagtttatttgacattttcttgggtcttcttcctctgtctggtcagattgcagaggaggatcgtaattccattttatgcaattttatctccactcacctttcataggaaatctctagaactctgagtaataattgctttgaattttagagttcaatgactgtcacattttcatctgtcttttctttcttaatcatctgtctttggtggtttgatgtttttagttctatagaattcataagctacagggaggtagaacacaggacacactcagatttctttttctttctttctttctttcttttttttttttagccctgagatgtatttgacttctgaacacctagaaccctttgttttcttctttcctgtattccctgaccctttattccagttccagcttgctatttttgtttgatacatttgcagattcactgaagaccacccagcccatatatagctagctcttctgtgagatgtgtatttaaccctgaaaaaactaatgcaagaaataggagagatgaccgaagggaagactcatagattcttttccccctggcattgccaggattttcatacatctcaccactagtgagaggctgagctgcttgctttaatatactgtacctcctgctagtgacccaaacagtgtggctttgagagaccctaagttcccataaagtttgtagtactggaagcatcttcctttgcttttatttagattgctgtcaatagactgcaaaagattacatgctgtaccttgtcatctggagctctgactttaccagttggcattatatgcttgtactctgtacattcagaattgctgggctaggaaacccaggtgcctgagtgatattaatctgctatatctgagtagctcttctaaaaaaaaaaaacactataggaagataataatcacatataatttaattgtcaaaatcattaagcactggttttacgtagtactttctcccaaaaagtacacaaatgaaacagttgtttaagcattaaattaccatatttcataaaggcagtcgggcagaggcatatggggttagatcagcactcatggacaatgtgaattacattcaagatggacagcaaaagactcccatcttctcccttatgataggccagggcagtttttagtttccagttccttagaacacagaaaagaaagaatttttttaaaaaggtcatatatactctgttatttacatcccacagaagcatatctgtgaaacaatttagcaactttgaaagaaaaagggtcactcaggttaattcaaaattgtcactgggttctccatatctggcagcttcgggtgttggcttcaactttttgcttgataaaatattgatataaaactgtaccagaatcccaggccgggtgcggtggctcactcctgtaatcccagcactttgggaggccaaggcgggtagatcatgaggtcaggagatagagaccatcctggctaacacaggtgaaaccccgtctctactaaaaatacaaaaaattagctggggcggtggcgggcgcctgtagtcccagctacttgggaggctgaggcaggagaatggtgtgaacccaggaggcggagcttgcagtgagccgagatcgcgccactgcactccagcctgggcgacagagcgagactccgtctcagaaacaaaagaaaacataacaaaacaaaaaacaaaaaacaaaaaacaaaactgtaccaggatccctatagttcttgttctgtgttcttataaccataccagaattttcttcatcacagacagagactaaactctttcttctcttacctttcctttgataatatttttgatccaggaatggggataattttgcagttaaaattttctttttatgatggaaggtgaggaggagagagaggtttacattagaagtgacccaactccattttcttccaatggtttttttcagttttatttttttaaagcgtgaacagagaatagtcacctgatcaatttaaatatgtcaaaaagtgaaagaaaaatctctcttttaaaggaaatgagggcagtaacacaaccaaggaatcaaaattcaggttgaggctgacctttgacctgcaactatgctactccatgaacagcaagtaggaaatggctgatttcatgaaggtggactggcatcagaggaggcgagggatccagggttcctgatgagtggcaacattccttggtcttttgagtttgtttgattggtgaatcaaatttaggtgacagccagctaaagagagtgagggtggctgtcttgtgaatgggaagtgaccaagcttgaaagcacagactgtggtggctcacgcctgtaataccggcactttgggaggccgaggcaggtggatcacttgaggtcaggagttcaagaccagcctggccaacatagtaaaaccctgtctctactaaaaatagaaaaattagccgggcatggtggcaggtgcttataaatcccagctactcgggagtgtgaggcaggagaattgcttcaagccgtgaggtggaggttgcagtgagctgagatcgcaccactgcactccagcctgggtgacagagcgagactccatctcaaaacgagaaaaaaagaaagtgcaggctgtataaatttaggaggtcttgttgacctaggatgtcctacttggcgcttcctcaggtgtgtcacccatgtgtatgtgccacacacttgcacagacattctttgcagaatttgctgttgtgttggcacactgttctctttataactcagcatttctttatttgcgatccagagtgtttttggtgcttggctttgcgcctcctttgctgtgaatgcatcctgatggctggagcctgtttgaggatggatattcttgggagttgtgtttgaaaacaacctcttgtggccctggacttggtgaaaaaggcaactgaaagcccagttccaaaatgaggctggctaattcaaaattgccacccataaaaattaaccctctggtgtactttgtgggttgagggtaggaggctaagactgccagggaggaggccccggcttcctgctcctaccggggagcagcaggtgaaactctgaccacgttactgcaatcctgacatgctccagtggagtggcgacatttttcttctcgaggcagcttttggggatctgtattactttcatgtggaccacttgctagttttgatttcaatgataatttcttccttcctttttttttttttcaagcctgtcttcatagtgatgacaacacatttaacatttgttttgatttcaccctctcctctctccccactctcagtctgcagccaggagagcagggacgtcctgtgcgaactgtcagaccaccacaaccacactctggaggaggaatgccaatggggaccctgtctgcaatgcctgtgggctctactacaagcttcacaatgtaagtggactgggatcagcaagaacagggctcgcttcctgatggtgaccagcaaacagcgtcaccaccaccctctccaagtgaatcgctcaccatgggggcagatgacaggttccaaataattgatgcaataggacctagcttggaaaactactttgtctagcatagccgtgctgaggccgagggggctcacagcctggcagccacacaacccccttggtatgcattggacactccacataccatgcagcaatccgatgtgctgagtgggcctgtgtggtttataaggaaaaaaaaaaaatcttccttttggaaaacaaaaaaagccaccggtcctattttgttgtttccttacattttaaactctttgcagaaagagagaatgaaagagaaaggtaaatagaattgtaatgtgtggcagggggtctggaaactaagaggacccatttggttactgagaggtaaaaagtcttggctaaatctgtgctacaaatttgaaatggatcctctgtataaaagacatggaaaaaaatgtctgacagatttcgtctgatgtctttgtccgaaccaactttcacgtgtagagagctagctcctgaggaaggtggctggcctgggggatgttaccataccagggaaaataaactgtcattttctccttttatatcatgttagcagagcggtaattgccagtcacctgaatttagttgtgtcatttctgatctttccatttggggtcctctcattttgtaacatatcttaatcttaaaaaatttttttttcagttttttttttttcctgaaatcattctggctcagaggccatgattctagtgaggcttcaagtttacattaactctaaagacaaaaatggttattttggtctttctctgtgttgctctctctctccttcctttttagctctttctgattctcctaaattctcttggccaacctgactttggcaaagtccggggctgaacagggaggagacagggacttttgcttgcggcggttctggcaatgaactcatcttactcaggaatacctgggaattggggaggaagcttttctggttggattttttgagtcataaagaacttctcagggtgaccccagcaccctgcttctttttcacttcttgggagcaagttgctgtgattccgaggagccctgtacgctcattccctgcctgtgccaactctctcgctgtggccctggtgcagtgaatgaaactagagtcttactacgatcccttattctcccttaggtcctgggactgtggtctatatacatttatcagcaattcaatccaagttctattttcactttggggaatttgcttgctgactacagtagagatagagattcgtgattaaaatctggaaggcttgggcttataagctattaggttattagcattagggtttattagctatccagtcatcagcactgcctatgaaattatttttgggctgtaatttatggatttcaaagaactttcatgttacttgattacatttgagcctgagatagtcccatgatgtagacagggcagaaattatttttatttcagttttacttgagggagttatgactcagaaaagcaagtcgcttgcacaaggtaacgtggctgagaaagtataagagtcagggcccatttcagagtcaggaggctttcctgggaagttggcagtgtcagaactaagaggagaaccaggggaaagggaatgctctctttttttagagtataacaaaattgtaacaaattgtgtgtgtgtatatttcatccctatattcgtggaagtataggaattataggagattaactagctatatgtttttttgaatagttagctgggatgagatatgatctcacttgtgtctgatcacatatatatatatttctgaagaacatgaatttctcaaatcaaagtaaagctgaggaatcctctccatggctcacttctacctcctcaatcttaatgagcttggtcttcatggctgggctccagtgaatgggagacagaaacttcctcatcctcaagagtggtttttctgtcttctctggtttaccaggaatttgtaaaaggaggcgattgatgtgtattgaacaataagagataataatctattaacattgtcatcacgttgcgttttgctctgcccttccagacatctctacatggatgccataagctctttcttcttatctaggtgttgagataactgcctacctcggtatcagcatctctcagtggtgttgtgactggttatctggggttgtgtggctactggtgtaactagatattatatttagatacctggctatgtatagctagatatcggcatcagagctgtgtatctggacattatcttggtgaagatttgatgtgggagtagattcctgtcatctctgtaggctgcatctttatcttgatgataactttgaagaaggaacctggagatgttcctctggcagtgacctttctgggctctcctgccatcggtcacgttgccttcctgggcttggggaaaataaggtctcagctccagtgtggggctttgtttccttctccaggtgacctctcccagctcagcttcgggaagctgggtgttggctgctctcagcaggttggccatttgaattcttcctttcttagctgtgattttctggctttgggaacagacaggtaaaacccagagccaagggttctccacccttgagaactgtggcggaaggcgatgctttcagcccgggaagtcaggaatggccaggacactgacattcactccttgagtctgtttgccaccctcccctgggaacatggccagatgtggagtttgctcttccgggcagatgtctgctgttggggttaatctgcttctgcctccctgtggggagtaacttctgtttactttgtaaagtttcctttcttgattctgggcccccaaagcaaatgtatttttaaaggcaaatgaggtttattaagaagagagaaatggcagatgtctccgagactgaagtctcttgatcttgagagtagggtctggtctctgtctctttactctagcacattcttggtctttccttttcaagatgagtgcccttttgtgctttgcaccccataggtggttattaaatacatgttgattggttggttggctgtttgtctggttagaagtggagagtcagagctaggtggaaatagcacttgcaaccattgcagctgctgttggaatgacacaggcaagagatcacttttgggccaggcgcggtggctcatgcctgcaattccagcactttgggaggccgaggtgggcagatcacaatgtcgggagttcgagaccagcctgcccaatatggtgaaaccccgtctctactaaaaatacaaaaattagccaggtgtggtggcaggcgcctctagtcccagctactcaggaggctgaggcaggagaattgcttgaacccgggaggcagaggttgcagtgagccgagatcgcgccactgcactccagcctgggcgacagcgggagacttcgtctcaaaaaaaaaaaaaaaaaaaaaaaaaagatcacctttaagaaaggcatggtttcataaaatacaacccggctacatataaattctagcggaagattttatggcacctcttaaaggccaggtagaagagaggcaaccgaaagttactcagtagaacagtacagtcctcatttcttcaaggcagacagccttaaccacctagaggctgatggcctggggagtacttttcaagttctgaagcagatttgtcaaagtagccaaaatggcatttccctcctgaagattcttcactacctcgattcttatgaaatagtctaaggaagttctaaagaaataagacaagtgaattctattttcgttaccagagaaatacaatcgtactagacggggctgtaatctggtaactgtatgtattttagttcttcagtccctgggaaggagacaggagaaggtgggagggaggaaggggccagctgaaatggaaacagatccctgatccggggcggtcagtggaacccttcttggtgtgcgagagcctgtgcatttcagaggcagcaaaaaagtaaaaaaaaaaaaaaaaaattgatctttgtttagattaacagacccctgactatgaagaaggaaggcatccagaccagaaaccgaaaaatgtctagcaaatccaaaaagtgcaaaaaagtgcatgactcactggaggacttccccaagaacagctcgtttaacccggccgccctctccagacacatgtcctccctgagccacatctcgcccttcagccactccagccacatgctgaccacgcccacgccgatgcacccgccatccagcctgtcctttggaccacaccacccctccagcatggtcaccgccatgggttagagccctgctcgatgctcacagggcccccagcgagagtccctgcagtccctttcgacttgcatttttgcaggagcagtatcatgaagcctaaacgcgatggatatatgtttttgaaggcagaaagcaaaattatgtttgccactttgcaaaggagctcactgtggtgtctgtgttccaaccactgaatctggaccccatctgtgaataagccattctgactcatatcccctatttaacagggtctctagtgctgtgaaaaaaaaaatgctgaacattgcatataacttatattgtaagaaatactgtacaatgactttattgcatctgggtagctgtaaggcatgaaggatgccaagaagtttaaggaatatgggagaaatagtgtggaaattaagaagaaactaggtctgatattcaaatggacaaactgccagttttgtttcctttcactggccacagttgtttgatgcattaaaagaaaataaaaaaaagaaaaaagagaaaagaaaaaaaaagaaaaaagttgtaggcgaatcatttgttcaaagctgttggcctctgcaaaggaaataccagttctgggcaatcagtgttaccgttcaccagttgccgttgagggtttcagagagcctttttctaggcctacatgctttgtgaacaagtccctgtaattgttgtttgtatgtataattcaaagcaccaaaataagaaaagatgtagatttatttcatcatattatacagaccgaactgttgtataaatttatttactgctagtcttaagaactgctttctttcgtttgtttgtttcaatattttccttctctctcaatttttggttgaataaactagattacattcagttggcctaaggtggttgtgctcggagggtttcttgtttcttttccattttgtttttggatgatatttattaaatagcttctaagagtccggcggcatctgtcttgtccctattcctgcagcctgtgctgagggtagcagtgtatgagctaccagcgtgcatgtcagcgaccctggcccgacaggccacgtcctgcaatcggcccggctgcctcttcgccctgtcgtgttctgtgttagtgatcactgcctttaatacagtctgttggaataatattataagcataataataaagtgaaaatattttaaaactacaa

SEQ ID NO: 956 - DNA, 3778 bp, Homo sapiens
  source 1..3778: mol_type = other DNA
agcgccaacccgcagaaccaggaaagtaacggctacagacagtgagaaatagtttcgctcgccggctagaaaaactctgtcggtaccaaccccagagcgttgagagcagcccacctccacgcttccttaacggagaggtgcaggactcagacttcaccagcccactcggtcccagccttgtacgcaaagagacgccaaggacgcgctctcccgcgtccaggcagccccagcttgctggcttgcctgcccgcctgcgtgcagcactcggccggcgtgcagcatgaccctgtggaacggcgtactgcctttttacccccagccccggcatgccgcaggcttcagcgttccactgctcatcgttattctagtgtttttggctctagcagcaagcttcctgctcatcttgccggggatccgtggccactcggtaagggtgtcctcatagtgcaggtagagtgggggaaggctcatgggcagattgtctcctgagggacccaggacaggtaagactgtacaagagcctccatgaatagtcgaattgaggctcaggtggagtgaagtcaggagtctggtgcagcaagcacccctttccaaggatagggagagctccccatccaggatatcctggagaaggaccccagctgggtccttgggaaggctgctgcagagaatgggcacccagtccagtaatcctgaggaacagtctaggcttcttgtgctggagggcctcccacctctcccaggactaaagctgcactctcatcccatccggtgggtgatgaccttcaggccaaaaggacagatgccagcagctcagactgcagtgttcccctttgcactgggttgagacacatgtgtatgggtgcctcatcctcaggactgagactcccacattggattagaagttggagccaactgggtgcattgtcttagactttccccctctcccagaacctaggttgtgcatttttcagttctgggaggacccagcttttctgcatcttaatctgtgttgctttccctggaactggtgcacctaggagtatctgcattcccacctcctcccctcggagatcaggctggggcctccctcttctgagggaggtgacccctgcgtgcctagcacttctggactcactgagcctcaccaagcagtgactggaccaggaggcagaaccaggaccaggcgccagacagctaggggagtgaaggtggtggaagagtgccaggaagtgggggtggaggggaggtgctgttagggtagatgggaaatggggctagggaggtgaaagtgcgtggtcacaaaatatcagaaatgccagtagcccagagggacttgcaggaaaagcgtgcctaacattagtctcaaaagtctggatataactaaagatccaggtgaagtggggtcaagggtggtcttggggactctggtttggcagggctcaggcctgacccgggtgcctattcctgcagcgctggttttggttggtgagagttcttctcagtctgttcataggcgcagaaattgtgggtgagtgtgtggtgcagcccatggggagaggacggggtgaggaaggaggtgggcagagggcacctgggacaatagggaactggggttggttttctgctccctcttcccactctccagctccttctagggcccactttttggcccttaccatgcaaccacattggacctctaagtccccatctctctgcagtgtcccacctcccataccactctctaattccattttcccaccctcatcccacccccaccgtgtgcctttccctacagctgtgcacttcagtgcagaatggttcgtgggtacagtgaacaccaacacatcctacaaagccttcagcgcagcgcgcgttacagcccgtgtccgtctgctcgtgggcctggagggcattaatattacactcacaggtgagggggctggggctaaatgaactcctggagctgggagatccccggttaggtgagtgtgtcagggatagctggagggcctctcacatcccacaagctcaaatagcttgtggtcctcgtggatttgcgttttctccaaccaccaccgaacccatttctcccgccgagagcgccacacccccactttcctgtctgaatccgcttagttgcgaggtctccgaccgcgggcagccccatgagcccgcctcaccccacagggaccccagtgcatcagctgaacgagaccattgactacaacgagcagttcacctggcgtctgaaagagaattacgccgcggagtacgcgaacgcactggagaaggggctgccggacccagtgctctacctggcggagaagttcacaccgagtagcccttgcggcctgtaccaccagtaccacctggcgggacactacgcctcggccacgctatggtaagtgctggagggaaggctgtgtgcacgtgtgtgtgtgccaggagctgggccgtatgagcgggaggatgcaggcctcggaggcgctgagcagctgcagccagacccgacgcgctcggggtgggcatgacagcctcgcgggttagaagatccacgagatctgcacagacggaatccggagagactccagccaccgcctggacctcaggagcccgcttctcccccggggaattcccctgcaccgctgccatcccagtccctggctttgacgctggggtagggataaagaagagcgcagctgtgggaaccccggtgggctgggagaagcccgctcacagcgggtccccccactccccggcagggtggcgttctgcttctggctcctctccaacgtgctgctctccacgccggccccgctctacggaggcctggcactgctgaccaccggagccttcgcgctcttcggggtcttcgccttggcctccatctctagcgtgccgctctgcccgctccgcctaggctcctccgcgctcaccactcagtacggcgccgccttctgggtcacgctggcaaccggtgaggaccgagagaatgggccccgggggctaagggtggagacaggattcacaccgggtgtgcactttccagtttacagaatgaattcacatctattaccctatttgcccctctcaatagttcgcagaaacaggcactgttatgaccattttacagatgaaaagtggggggctcagaagggtttggtgtcttgccgtgtttcatgtaattcagattagaggtgtgtggcgggaggtaacacaaggggtaggctccaaaagatggaagaaggcccgggcatcacgcctgtaatcccagcactttgggaggtcgaggcaggaaggtcgtttgaggccagagttcgagaccagcctgggcaacatagccctgactccacatgccctcctttctttcgatccccaccgccacaggcgtcctgtgcctcttcctcggaggggccgtggtgagtctccagtatgttcggcccagcgctcttcgcacccttctggaccaaagcgccaaggactgcagccaggagagagggggctcacctcttatcctcggcgacccactgcacaagcaggccgctctcccagacttaaaatgtatcaccactaacctgtgagggggacccaatctggactccttccccgccttgggacatcgcaggccgggaagcagtgcccgccaggcctgggccaggagagctccaggaagggcactgagcgctgctggcgcgaggcctcggacatccgcaggcaccagggaaagtctcctggggcgatctgtaaataaacctttttttcttttgttttttaa

SEQ ID NO: 957 - DNA, 6660 bp, Homo sapiens
  source 1..6660: mol_type = other DNA
tatagcagcggcggcggtggcggcggccacaccgggcggcggacacgtggagggacccggcccgcgccttctgcccctgctgccggccgcgccatgcggtgagcgccccaggccgccagagcccacccgacccggcccgacgcccggacctgccgcccagacccgccaccgcacccggaccccgacgctccgaacccgggcgcagccgcagctcaaggtactactggcgccgggccgaccctgcgcccccgggaggcctccccttcggctttcctctgcccagggacggttctgccagggccctggcccggccgccgcctctgctcctccccgcagccccggcactccttgcctcggggcgcagcccactccgggttccgacccgcccgccctgtccttcccttccagatggcccgaggcagcgccctcctgctcgcctccctcctcctcgccgcggccctttctgcctctgcggggctctggtcgccggtaagtgcggggcgcgtctcctccgagcgaaggggacatcagagccggccgggcgtggagggcttcctggaggaggcagcctccgccctgcccgcggggatgggggtggaaagtggaaaggcgggcgctgtcctggctgcgggcgtcgcgggaagggtccggggctccctgggattccccccgcgcgcttctccgagtgtatcaacagccccgggctataaccaggccgccgggagagctctgcgcttcgggtcagcgcctcgggaaagcgagaagctcgcccgttccgcagggcttagttagaatggagggctaggagccactggcgtggcctcagcgtcactaaagcaggtgcagtgcgctgagagtgcgcgggctcaggccctcaagtgaagtatttcgtaaataaagtggttccattttcatgtcaaatatagccgacttaggggtaaacctggaatttcgcgagctatccaaaagcacatgcattgttctaagtcctctgccatgccgggaaagcctgggtgcacccattcagcataggctccaggcacagccctggcatctgatccccttttctcccttcaaggccaaggaaaaacgaggctggaccctgaacagcgcgggctacctgctgggcccacgtaagtgactgacagcatggcctccccactcctgaccccacctgcccctcgctttgaaccctggctcctgcccctccgcctgcggctgggcagaccctctggcctccctcttgacctcattgcccgtctccattgctctgcacacttgatctgtgtacggttctttccagaagcttctcctgccccggctctgccgccctgtcccggggtgagattcccaccctgggctttgctcaagttctcctgggctttcccgccttgcagtccttacaggccctgttctgggcctctccccaggcccccgggtctcccaaaacactcaactcctcggcttgcagagcaccctaggtcagcggaccccaaatcctgcctccctcttccctttctccaagctccacacgggaattgccagatcgcctgaaggcagcccagacaggctcccctcaaaacaaggttcaggtgaccctgcctgcccaagcctgtgtcccctccctctccctgtcctgttgttgtcacctgtgtcagcggtgtcccctgctgcctgaggtgagccctagccctagatgggacactgcaggctgacacctccccgtgtccgcccccgcccctgtcccaggcctctactttctccacatccttggtctgtgcagcaatgccttctgactttcctccaaaggaggggacaagaggaggccttggttccctcctgtaactcaccttcccctccacacctcaccatccaccttaaaagcctccctgtactgccttctgccagaggaaggatgtgaacagcacgcagggcctatctgagccccgcggagcagcaaatggggagaatggtgctcttctccccatgccaaggaaagctgacttagttctcagtcccagagtcgaatacagcttcctcctcctgcagacgcttgtttatcggggtcactcagaggacccccagagtcaggctttaagaaacagacacggggatgacagagccgcctgaggccgcgtgcggatcggtccaggctgttcaccacagagcctgctggtctctgtgcggccctctcatcctctccctgcccatggagtggcctgacctgcctgagggtcggctgatttcctcaaccctttgcaaccctgagctctgccactcagagggcacctcatctttgtgtgctacgggcccaaaacaaaggcagaactggtcaatgagaacatttatctgtgttgctttggaatattgaaaatctatttgtcaagaagagtttgacccctaattagaaaacaaactcattttcgccatcaattttacggccctgttcagctgtagctagacgagttgtttgtcaaaatacttaaaaatgtgcctttgatttctaggatctgctagaaatgcagcaaaagcaatgtttttgcaccagctgctgctgaacgcagtgtggccgtggctgagggtgcatcagtgacatgaggcgacctatgattcctctataaatttagcaccaagaacggcatctctggaaatacgcgttaattctcctttgtctggccttgtagatggcacagtccacccaggccaaccagctggaaacacagaggcgtcctcaccctcgtccccatctctcatttccatttcctttcctgcacagccccaaatccagccctcctcttcaccccacgcctcttggtttacagccttcatcgtttcttccctggaattctgggatctctgtgcttgcaatcacagttcctccattttcgcaccacgaaacacacccacacacacacgggaacgcacacacgctcctgcaccccccacccccatcctgtctccctctgtgaccctctcgctccctctgtctctctccttctctctctctggctccagtccatcttgcacacagctgccagagtgaaaataaaaatcagattcagtcacaacttaaactcttcagcgtcccccatgctttcagggacatgaggacccagctcctgttgtctgccagggagtcacccagtttgatgccagctcagtgccagctcagatgccagctcctctggacccaggcgcaacccctgcaacagggcaggttctgggcctctcccccacttcaggagccacacctccctttctcccacccaccctgtgcaaaccctcacattccctttgaccctggtgtgagcggccaagctcttacctcagctgggtggagaatcgctccctctgctctggtgtctgtccctgggctctatttcacagtcgagttgcgtgtgtgtgttggctacaggcagccctgtgtccttctttgggtgtggggagggcgtgcatgacagtcacacccagaggctttcctctctgatctgcaaacagatgccgttggcaaccacaggtcattcagcgacaagaatggcctcaccagcaagcgggagctgcggcccgaagatgacatgaaaccaggtgagaggactcctatcccgggccccggggcacctcacttccaccagctcccaggtgcatgcaggggacagctgtgggtgtcggggctgtccacagctgcagcccaagcctggccatgacttgactaagacgatgtggcctcgccacacctgtcagcagctgcaaacagaacgtgcaaacccgagacagcaaggggtccttctaggctgggaggctgcccaggcaccagggcctccagaagagcgggactgggcacgatggctcctgcctgtaatcccagcactctgggaggctgatgcgggtggatcacctgaggtctggagttcaagaccagcctggccaacatggcaaaaccctgtctctaccaaaaatataaaaattagccaggcgtggtggtgggtgcctgtcatcccagctacttgggaggcagaggctcgagaatcacttgaacctgggaggcggaggttgcagtgagccaagatcatgacactgcattccagcctaggcaacagagtgagactccatctcaattaaaaagaagaagaagaagaaaagcgaggcctcgaactggatatctccccaactccctcacattgaacaagggccttggaaagcacagcagggcctcaggctgctgggatcagatcattgaccttgcagcgcccagctcctctgtagggagggggatgacctgagacactgaagcaccctctgcacaagtcgtgaatgttgatcttttctcttctaggaagctttgacaggtccatacctgaaaacaatatcatgcgcacaatcattgagtttctgtctttcttgcatctcaaaggtatgtgaaatatcatcaacttaacattcatctcttagtacactggaaacgtaaaaggcccatcgagaagagaacccatagaatccccctgggaagtagccgattacttatctacgtacaaagtcctgtttggctgtgtgtcgggataacagagaatgtaacactagagctagctccagagggctgggattgcggcaggggcattctaccgtcgtggagggccatcgggccagcgctggtcccaggaagagagtgggcctcagggtgcagctcattctactggaaccatatctattcacacggtgacaactgctgtaccttttagggcagaggtatactacaggccaagttctttgtgaaccgtcctaaaccttttctcttttcttttttctctgtcttttctttctcttctctcttttctttctttcttctttctcttccttccttcctttttcttcctccctctttctctctctctttcttccttccttccttcatctcactctgtcgcccaggctcgaatgtagtggtgcaatctcagctcactgcagcctctgcctcctgggctcaagtgattctcgtgcctcttcttcccaggtagctgggaaaacaggtgcgcacaattatgcctggctaatttttgtatttttagtagaggctggggttcatcatgttggccaggctcatcttgaactcctggcctcaagtgacctgtctgcctcagtctcccaaagtgctgggattacaggcgtgagccactgtgcctggccctaaaccatattttctaagcatgggaaattaatagaagcccatatcttagactgcagtgtttctctatgcagccttcctgccaggcaggctgccttgaaatctaactggaaaggctctgatcctggcttccagtgtcttctgcaaacactggggatgaggagacctccgcacactacgcttggcattcattctacgatgggcatctggccttgatcagataaccacacaggtcctactgcagcagtggagggagccggaaagcggccccggtgctctgagggttaacagggaggtggtggtggggaggagggatggaccgctttgcctctccagcagagaagaccttcacctggtgctctgagagttaagggggaggcagtggtggggaggagggatagaccgctttgcctctccagcagagaagaccttcacctggtgctctgagagttaagggggaggtggtggaggggaggagggatggaccacttagcctctccagtggagaagaccttcacctgctgctctgagagttaacagggagctggtggtggggaggagggatggaccgttagcctctccagtggagaccttcagttgcacatcacagttttgtccagttttgaaaaatcaaggctaatccttgggttcattttggatcaggatgtttttcatttgcagtgttatcgggctgcactttaggtggcgatggggagagggaagaggagtgaggggaggggagcgggggaaggagactgccagagaaggtcttggaaaaggcggtgttcattagaaatctcaaaaccgagtcaccaagttccctctgttggagcccagtggagcctctgggagaaaagctggggtgacttttcctacaaggggcagagggactctgctagatttttgtttttcatttgtttttaattttgtaacatggaaactctttccttaggatataccagctctcattactcagctaggaattatacctctttaaagcctgaatttaaaagtctgacagttttaaatgcttactaactgtgggagttaaatcattacgaagtgaggaatacagagtgttgtccctgattctgggtttaatctggtaagaatctttacagaggacgaccacacgccgcttcctgtagcatgtgtcgtggttgtaattctctcatgtgcatattaagaagttgctgctcagatgtggctcttccctttgcagaggccggtgccctcgaccgcctcctggatctccccgccgcagcctcctcagaagacatcgagcggtcctgagagcctcctgggcatgtttgtctgtgtgctgtaacctgaagtcaaaccttaagataatggataatcttcggccaatttatgcagagtcagccattcctgttctctttgccttgatgttgtgttgttatcatttaagattttttttttttggtaattattttgagtggcaaaataaagaatagcaatta

SEQ ID NO: 958 - DNA, 32744 bp, Homo sapiens
  source 1..32744: mol_type = other DNA
cgcgcgccggcctgggcaggcgagcgggcgcgctcccgccccctctcccctccccgcgcgcccgagcgcgcctccgcccttgcccgccccctgacgctgcctcagctcctcagtgcacagtgctgcctcgtctgaggggacaggaggatcaccctcttcgtcgcttcggccagtgtgtcgggctgggccctgacaagccacctgaggagaggctcggagccgggcccggaccccggcgattgccgcccgcttctctctagtctcacgaggggtttcccgcctcgcacccccacctctggacttgcctttccttctcttctccgcgtgtggagggagccagcgcttaggccggagcgagcctgggggccgcccgccgtgaagacatcgcggggaccgattcaccatggagggcgccggcggcgcgaacgacaagaaaaagtaagcccattccctcggcccgccgccttctcccccggcgaccccgcccgcctgcccgccctgggctcctgggccggcctcggcgttaatgggattggggggggcagcctttttgtttctgctgctgctcccctcccctctcttcccccaacctcgccggccgggctcccccgctgtccacgtcgccatcttgtcgtggggggtgggagacgcctcgaaagtgctttcaggggccggggtctgagccctgcttgccctccccgccggccgtgggggcctcgcgccgcccacctacccgcctcaaaaacccagcctgctctgtggccccatccggaggggactttacccagcctgaaaaccccgggaagagaaatgagctgcagctcggtagccgcggtttgcacccggagcttccgctccttcccgcccccatcctctccagttccattgaaaactcggccctggggcggaccctgcacgctggtcctggctttccagtggacttggggccttgagttcccgactgagggactcgcgtggtcggatgcgatcttgtcctgtagttgtccagccgtcgcgggtgtctttgcctttgtgcattagggatttgccgcgatggccttaagatgcgaactttttagtttgcacgtgcaggttttgtttcgttttaatcgccttgaaaaacttgcctagactgagagtcagagtaatgggaatttagggaaatggcaacattttaaagagaacttcagaattggatacttgagttcatatcacctgtcacgagaacgcagatattataaatgaatatatgcctcattcattcttcaaataatgaaaatgtaggggctggttaaatttaggcagttttaatgatactgaaaaaagtatatgatgagtgaatgaaatgcggcactaaaatgttgcaaaaattttcgaactctgtctcattttcctgaaattgaagtatattaaaggaaaaccgtcaacatatatctaaagtaagtaatcactcggttagaacttaatgcaagttttataaatcaccttgaagtttgagtctaaggggtacattagagattaagaattgtgagttggaccagtggtgttaagagcggactcccccatcccccaacacacacacaattttgcccactttggcattttaacttttaaggaaatcacttaaggaattgaagatttagagtaagagttttggttagtagactggctttgctgttaaatccttccactcttctggcagagagattaatttccctaatcagtatcagcagaagataaacttgtttatattcctgctgttttgtagatcccttctcctggtccttcttcaatagaatattaaattcttagtttgtatacagcagagaaggtcacttataaaattcaaaaagtgagcaaacaggtctagattaattccaagagttaccaggaattaattgcagtttattttgcggaggtgattacagtgcttttgatgaaatgataaagctgctatattgtaaacctaaggcagattacctctgtgtagtgccagttttctatccttattatatattgaatcatacttaatacaatgcattaaattatgtaccactttttttatatacagtatcgaactcattgttttgccattcatccgttcagaatatcagaagcagttttgaaacgaattaataaattagctactgttcatcagccccaattctaaataagctcttagattttcctcagcccatctgttactttcaaaattttctcatttgaaaacttggcaaccttggattggatggattcatatttcttagtatagaagttcttgatataactgaaaaattaagttaaacacttaataagtggtggttactcagcacttttagatgctgtttataatagatgaccttttctaactaatttacagttttttgaaagataactgagaggttgagggacggagattttcttcaagcaattttttttttcattttaaatgagctcccaatgtcggagtttggaaaacaaatttgtctttttaaaagaaggtctaggaaactcaaaacctgaagaattggaagaaatcagaatagaaaatgggtatggttatgatactgtagatttaacgcaggacatttcatgttgttcctagttataggggctgaacttatttaatagcacgtgcattttgatttttagatttttaagggaatgtcaagagagtaatgattctgtttcaggcttcaggccagactccttcagagttttccaaaacaaataattactgaatcattaaagtaaaatttctgagaatagatattccttaatttccttcattaactttggccattaaaagtcaagaagctctctcatttattagcaaacttttctccttatgattctattttgattgtccttttgtttgaggaagcagcatatggtggttaagagcataggatctagaggcagatacctctgagttaagggtcccagcccttcacttgtgagcttgagcaagttactgaatgcctctgagcctctttcctccttttgaaatgatgataagaatagcagccatctgagcagttattgtaaaggttaaatgagataatgcttgtgaagcacttagcccattgcaggagtcttgatgacactgtgtacttgaaaatagatgttacctgttaaaattcttgtttaaacttccacaactcttaaaactcttttttgctagtccttccagctgtttcctttagtttcttttctgtgtcttcatgcatcttttctatctcctgaaagtgaaaagactaacattggatccagagcttgaaaagcgtttttttcctgttacaatgggcaaaagagtacatccttgggttatattggcacctagtatcagttatttttcttgagcatctgatctgctctctactctagtggaggcctcctgcttcacaattgctcacccctgtgttttctccccaaatagaatactgagtttactctggactctagagtcaaacatacacagtattctagtcttactgttcatttaagcaagatatgtgcaagacactgcattcttagtactggcagtaagttaaaacatttttcgtcttgatgccaaagtttagacaattttataaaaattaacctttgtaaaagataatgagttgataaaatattctcagtaaagcagctacgtggtagaaaaactgtcctttgcttatgagtttctccagagttaagaccattgggttccatctgaaggcaagacttcaagcttgtcttactggtctgttttgtggctcaatttgtatgaagtctatgcactcttccacacgtgtgtatttactgaactatcgagttattttagactgagaaagtattggagttcattcctacggtccactgcagagcaccttgtgcagtttggagaatgtcaacttttctacctgttaacttccattgtctttacttttaacgccattgtctgtgactctaatggtgtcacggctcagggtttagattttgtggttacattctattcttgtatgtcaagagtggtgtatagaaagctgagggggattatttagtctcttgactgattttttttttttttctgaagaactcagtttattatgtttggtggtgaaataaaaattgatgtgcatggatgttaaagatttgggttaaattgtgtgttcatagatgccttctcttagtatataattttttaaatttagatacttaaaatactgtatccctttatctaagattaacataagtctgtttcttaaccaggataaaaaaatctaaatttaaatgtgatgttggatgagtttccaatcaagaaattgattttttaaactttgtgactagttatccagtgggtggattttacccagtgtgtgtatgtgttttctgcttaactctggaaggttagaaagagaatttgaaactaagacaagccaagcttcttgttgctcagtatttttggtaaaaatatggtcagattgtttaaattaactataggctttggaattttaaaaataattatatctcttggtctcttgacacatcaagaattaactgttttgtatatgcgttgagtattaatgttcatgttttctgcagtagaaatttataaacccttatttatttgccagacatgatccctttagagaaatctagtatctaaaacctgaatttttaaaacaaaatttaaaatttttgtttcataaaaacaaaaatgtgattacctcatggcttttttcttatagcttttgattgttttttaaaatcgtagttcaaaaacattaacctaaaatttaccatcttaaccatttctaagtactgttcagtagtgttaagtatattcacattgtgccactaacttccagaactttttcatcttgcaaagctgaaatcttacccattaaacaactcccaatttccccctctcctcagcctctggcaaccaccattttactttctgtttctgcaaatttaactactctagatgcctcatataaatagaattatagggttttaatatttttgtgatgggcttatttcactttgtgtaatgtcctcaaggttcatccatgttgtagcatgtgtcagaatttccttcctttttgagtctgagcaatattccattatatgttccatattttgtttctccattcatccagcaacggacacttgggttgcttccacatcttggttattgtgctgctctgaacatgagtctgcaaatctctctttgaagctttcactttttttggatacatatccagaagagggatgctggatcatatggtaaccctttttaattttcaaggaaccaccatattgttttctatagcagttgcaccagtttacattcccaccaacagtgcacaagggttcctatttctccacatccttctaaacacttgttttctttctttccttccttctcttctctttctttcttagccatctaatgtggcaaagtggtagccatctaatatgttgaagtgattgtttttaagggcttgtttgtggataattaaccagctgaaagctaactacagtttgccagtggaagctttaactgaaaggagagtaagtacctctaaaaggagaattcaatttttctagtgacttagatttgttatgccagtactttttcacagaaacactttttgggtaaaatagtgtacacctgttctattgttgataaagcccaatttaattaggaaatttgttctctaagatttaaaacaataattgaaataatgtatttttattaaaaactgttcccaagatgttagcttttagctgttctggtgatctcaactgttatttatgagtgtttctttattttaaaatttcaccttaaccggttacagttttaaccataaagattatttcaacatatgattttgaaaatttattatcttgtaaatgggaaaatgtagtgatggaacatagtttactgtatgtagttcttcacttgtttgaaaagtcacaatatatttaggcaaattaatttaaaagtgtctagtatttaatattgcaattttcactcattaaggacaggtcccccgtgtttcccccttttttttttccaagtagtttgggaggatttgtttttccagctgaaaaatactatggttaaaaataaggtttaaaggcgaaagttgaagtctttgagggttgggatacgtttctgttcttaagagtcttgtaaattcagatgctaagcaaatttctttaaaatgatttctaccctccccctttccattataaaactggatatgtttcagtggaccaaatcccaagtaggctgaatttgaaatttgtgggctgggcgcggtggctcatgcttgtaatcccagtactttgggatgccgaggtgggtggatcacctgaggtcaggagttcgagaccagcctggccaacatggtgaaaccccatctctactaaaaataccaaaattagccaggcgtggtggcgggtgcctgtaatcccagctacttaggaggctgaggcaggagaattgcttgaacctgggaggcggaggttgcggtgagccaagatcgccccattgcactccagcctgggtgacagagcaagactgtgtttcaaaaaaattaaaaaagaaatctgtggtgtgaatactggtacgtggtgtacacagtgagctcttaataagtatttgaattaacaaatgagacaatgattgaataattggatgaacaaagagaatgcaggtttttaaaaggtttctttagaaatattgtcggcccggcacggtggctcctgcctgtaatcccaccattttgggaggccggggcaggtgaatcacctgaggtcaggagttcaagacaagcctgaccaacttggagaaaccccgtctctactaaaaatacaaaaaaaaaaaaaaaaaaatagcaggatgtggtggcacatgcctgtaatcccagctactcggaggctgaggcaggagaatcgcttgaacctgggaagcagaggttgcagtgagccaagatcgcgccactgcactccagcctgatgacagtgtgagatgctgtctccaaaaaaaaaaaaaaaaaattaaaaagaatgttttaattctttagttccctgtctgagattcactgattggtaagaagaaagttaaagaatctcctttgactttttttgatatagatatttaaattctattactttatagtaaggttggggtttattttctttgctttataatagaagagcattgattattctctttgctttataatagaataccatttaaataggagttccctgagtgtgtttacaatcatttgatctggctaaactattttaatgttaatgaaattttaaaattttggaggaaaaaatttaaaaactacacaggtgcacaaagaaataaaaatcacctgctttttcactatgtagagaccattgtctactatttctcaattctgtgttacatctgtatgttaataactgtaggattagggactgagtactgtttttaacctgcttttaaaaaatttacatctacattttttcccatctaaatagtgaggaagagtatcagaattttgtaggcttgtggtgatggttaaattagataatattaatgttgggtacttaacataatatatggctcttaatactctccagatttcagatatagtctgttttaccattactgcctttttatcaaacctattctcaaaaaagtgagaaaagtgctgagattacaggcgtgagccaccatgcccggcctcatggttctttcttaataataaattagaagaagtagaattacagggtcaaaaagtatccattttaaagctttcaatgtaattgcctgtttatcttctagaaagtttgacctagttgtattttagagtgtcattttcttgaactttatcatcattaaagttttaaatttggaacactggcaatttgataagtatattaggattcttcttattgcaagtagcaaaatacaactcaatctagtttaagaggggaaaatgtagtcattggctaacacaatctaattttggtttaagagacaaatctagagtctcaaatgatctcagagtgtaataatccctgacttttgtcttgatattacttggcttgtatacctttgctctatttgcatgctggccttactctgccactgacaggctgtctgtatggtgtggaagaggacggctagcatccccatacctgcatccatacagtttgtaatataaaaaaaaaaaaagtaaaaaaaactccctctctcttctagtgtctatatatcagtttcctagaagaaaacgttttgccctacttggccatgtgaatggagttccctgattacatgagtcaaatatgtcttattgtagcatatttgatggtcttcttgtagaatattatcttactatacacagaactcttgaccagtaattaatgggccatgagtttttgttgcaagtcatttgaattcatattctatagttttctaccaagtgtagtcattctgcaagctgttcttgtcatgacttttgggaagttgagtatttcttctatgggttagggttttcatctcaagaaaaagatgatccttttctctactaaatatgtgttaagatcacacatttttctagatcgtttagctctactgtgtgatcttacacaaattgctttattgggatgataagaataattgccttataggattgttatgagaatgaaatgatacatcaactcatatgaaacactcagaacagctcttggcacaaagtaagggcttaattaagtagaaactatccatatattcataatattatagtattggttaagttgttttcaacattgtttagaatcgctcaagccttctttgtgataatctgacgaaggctattcaccaccagtgagtaaataatagtggcagaatagttactgatgcttttcctttacttggttttttttccataaacatctggcctttgcagactaaatactggtttatgtatagacatgttattctaaaataattttccatagtggtaatactaaaggaagaaaaatgttctcaaagctatttatttgggatgttaaaggagggggaaattaagaaagcctacatttccatgtcctttgtgtccagaatctcattaaatgtcttttaacttgttagcagaggaaagttggatattgcctgcctttgtagctaacatagttaaaatatttaaatggttatagtgtcaaaccagtagtcaaagccttcactgtgaatggatgaagggatattttcttgaataatttaagttgacttatttcagtggttcaaaaaatttcttcaacgcttaaccatgactcaggcacctaactattatactatgtcctgtaacagattgttgtgcattcatttattcaacaggtatttgtgcagctaatttattgagtacagcattgaatcgttgatggcttaggccacagttgaacattccattttttatgttcattcattcattcatagcatattccatttttaaattttcagttcattgcactttaaagtttgaggttcttgcgaagtacagacttttgggtttaagttttgttatttaatgtcaaccaccacaggcgcattggccagtctgcttttagaattttcagacatacatacacaaaacattctcacaagacaatctacttattttcttttttattcctgtgtttcttaacacaggattaatgttcagatctcttttggagcaaaataatcctctgaatttttgagatgtacccagtgacctcagtctgagtatgtatactgcattaaaaaatgtaaccttgttccttttagtggtcatttggtaacagtttgatcataaacaaatgcagcctcaaacacagaaggcttgaggcaagtatacagaactatggagagatcatttagatgatgtagaatatgccttttctttttttacaatgccaccaaaatgaaaacacggttttaaaaattctcatagagtgtaacttcaacactgctttaactctattaaacaaagcactgccatgttgtaattcctatttattactctctggagttgtataaattaccaaatccgccttttgtttgatatccttttcaaatatctgagggtagctatcatgtttcttccttctattcttaaaaaatagtcccaaatttcttgaatcttttaatttaaaaattatatattgagcatctgatttgtggaaaggcataggccatattaaaaatggggcttcatattaaaatggggaaaagggtggagattctcaggtggaatctgagatctgccacacactaatagtgttacctaaccctttttaaagacaaagaaacaggatcagaaggtcactttggaaaatttatttggtaatattggataggatggattagtatagttggaaaacagagactcttgctttaggagagctgctcctttgtcatttccagaatcttaatcatggtcaaggtttagagctaaatatttaatagaagaagtctttagggtatgctttctattgtacacccttatttcaatacatgtgttttttcctgttatgtaagtactttattattatttatgcatcttctattaaagttaagcaaataattatttcaaggacacattcttctacatacacacaaagtttagggtcactgaccttcttaggttctagtcttagatctgttaccatctaagagcatataaataagggaaacagaaagaaaaggatttacaagctgagaaggaagcaatgcagagaaagaagagtgatagagtaggtaatttggggaaagtcagtgatacacagctcttaaccatgaacagtgattcttcactcttgaatgtttgtgacattcatgaaggtattaaaagctgacttttaaaaaattgtttcagagaactggaaaaaaattcagttgccacattcttccttaggtcatctttgaactctactcatgcacttacgtgtttaaggcaaagttttactaaacgcacacttgttcttgctggcttattgacttttactgctagcttcttattcttagcaattatacctcacattacatagtattgtgaaactcactatattcagtgttttgcctgacaaacatggtatgttataggatgtgtattcagttatagctaaaaataaattattctcgtttttcaaaatttgctggcctacctgttaagcttttgctttaagacctgctaatgtttctcaaacttctgtggttaaatcacctgagtgtctagttgctctatggattcccagggacccattcgccagagattctgatttggtaattttgggatggaactcagggatctgtaaattttacaagcactcagaaatgaaacatagactttaaacagctaagagtgctcatcaggattatgttgatattattttttaaacagatgtgccaagcctttaatttgaatttccagggttgggatttggccttctatatttgggggaaaaaagttctattgatgattgtggatatataccacaggtcaaccattgaatagtctagtcagtgtagttagtgtattttataattactaagttctaagtatgtggtgtattaatgtcttaggaggtggatatatttcctgtatttgtaaagcatttgggtaggttttttaaagagaaaagtatgtaacaaactagttttgagcgttgctcttttacttctttgggcatttttgaagaacacgttaagtatcttcttagagcagaggggctcagagtggtccccagattatcatcattggtaacacctagttggtgcattactaacttgttagaaatgcacattctcaggcgccattcagacttcataaatcagaaactctggaagtaaggctcagcattctgtgttttttttttctttattatactttaagttttagggtacatgtgcacaacgtgcaggttagttacatatgtatacatgtgccatgttggtgtgctgcacccagtaactcgtcatttaacattaggtatatctcctaatgctatccctccccgctccccccaccccacaacaggccccggcgtgtgatgttccccttcctgtgtccatgtgttctcattgttcagttcctacctatgagtgagaacacgcggtgtttggttttttgtccttgcgatagtttgctgagaatgatggtttccggcttcatccatgtccctacaaaggacatgaactcatccttttttatggctgaatagtattccatggtgtatatgtgccacattttcttaatccagtctatcattattggacatttgggttggttccaagtctttgctattgtgaatagtgccacaataaacatacgtgtgcatgtgtctttatagcagcatgatttataatcctttgggtatatacccagtaatgggatggctgggtcaaatggtatttctagttctagatccctgaggaatcgccacactgacttccacaatggttgaactagtttacagtcccactaacagtgtaaaagtgttcctgtttctccacatcctctccagcacctgttgtttcctgactttttaatgatcgccattctaactggtgtgagatggtatctcattgtggttttgatttgcatttctctgatggccagtgatgatgagcattttttcatgtgtcttttggcagcataaatgtcgtcttttgagaagtgtctgttcatatcgtttgcccactttttgatggggttgtttttttcttgtaaatttgtttgagttcattgtagattctggatactagccctttgtcagatgagtagattgcaaaaattttctcccattctgtaggttgcctgttcactctgatggtagtttcttttgctgtgcagaagctctttagtttaattagatcctatttgtcaattttggcttctgttgccatggcttttggtgttttaaacatgaagtccttgcccatgcctatgtcctgaatggtattgcctaggttttattctacggtttttatggttttaggtctaacatttaagtctttaatccatcttgaattaattttagcataaggtgtaaggaagggatccagtttcagctttctgcatatggctagccagttttcccagcaccatttattaaatagggaatcctttccccatttcttgtttttgtcaggtttgtcaaagatcagatggttgtagataagcggcattatttctgagggctctgttctgttccattggtctatatctctgttttggtaccagtaccatgctgttttggttactgcatccttgtagtatagtttgaagtcaggtagtgtgatgcctccagctttgttcttttggcttaggattgacttggcaagcattctgtgttttgagaattcttccaggggactgtgatgaaaactgacgtttgagaaccttcatcttagagtaaaaactttacatacacatttttgttgttttatttatctagcacaatacttcttttttttgaaatggagttttgctcttgttgcccaggctggagtgcaatggtgtaatctcagctcaccacaacctccatctcccaggttcagttgattctcctgcctcagcctcccgagtagctggggttacaggcacgtggcaacatgcctagctaattttgtatttttagtagagacggggtttctccatgttggtcaggctggtctcgaactcccgacctcaggtgatccgcccacctcagcctcccaaagtgctgggattacaggcgtgagccactgcacctggcacaataccttatatataatcagggctcaaagatttgttgagaggctcaacaccaattctggaccaggaaagattttatttatatcactagtcaggaataatctaaaaacaaaaagcacattcttcttacaagtaatatttcaatacacattaatgtaaacacatggaaaagtattagctacttaataaattaacatgtaaatgaaaaatttacacattatggctatttcagatgtgatatagatttcattttcagaaggaaccctccaatgtaaaacagtgattcttttccccgtttattttactgcattagaaaatcacatttaaagtaagcattttggtgaggtttggaaggtgaataaatccatcttttctttaattatggatatttaagagagatgttgttgtgccgtttagataataatgatctaaaccaagaaatttagttgctttcaaaaataaaataagtgtatgcattctgaacatttttctttagaaacaaaccatttcatctgtttttttgaatttcaaattaattatacagaattttcaaaatttgaaaattaggttagcatgagaaactgaagatactgaattatattgcctgttcagtctatacttttctttaggatatacagtaggaaagaaatatgatagttcaagttagattactacttctttcagagttttttgacaaatgcaggtacagtgatagtgtcagttcatggtgaatttttgttaaaataaattacaaaaaatttgtgatcctggtatcttgaaactagttaatatttgtaaactttgctaacactgtatatcactgtattctggttttatctgtgcatctatgagttatatgtgtgtatagctacatatgtttatatttatacacatacattacacacaggagtggaatcatactcaattttttttgtatagcctgctctgttcatataatactatattgtagcatctagtataagcaaagattaatttttgtagactttgcttttatcctgaaattttgtggtagctggtttaatggaaagacaatttctgtgacgtgttttgtcagttagggattgaccctggtaaaatattgctggataacaacaagcaatgtaaaaatacatttgttccataagataacctccgtgaaggtagagacttggtctgttttgtttattgcaccgtgtcctgttctgggaagagtgttagactcatagaagatgatcaagaaatattttttgaatacatcaataacattctctaacatgtgggtatcctaaaggtttatttttaaagtttattgattagaattcagaagatattttcccagataaaataatagattgctagctgtcttgaaaatgtaatttatatttaatttgaaatgtcaggtttttgctattttttccattaagtagagatagggtttttaaaaattacatgtgatgttttaagtattctggttttgcaacaattactagatagaaaatgtaacaacagatcctattaataatacttccaataatacatataaaatacttgtctaaaagtaaccctccttaaaaaaacaaagctggccaggcgcggtggctcacgcctgtaatcccagcactttgggaggctgaggcaggcggatcaagaggtcaggagttcaagaccagcctggccaacatagtgaaaccccatctctagtaaaaatacaaaaaattagccgggtgtggtggcaggcgcctgtaaccccagctactcaggaaaatcgcttgaacctgggaggcggaggttgcagtgagcggagatcgcaccactgtacttcagccttgggcaacagtgcgagactctgtctcaaaaaaaaaaaaaaaaaaaggcaataggattaggtatcaacttaatgaaaacttcgtgacagcactttcttgaaaaagactgtggaaaccaaagttagtaaactcctgtttctgcctgggttcggaaaacataaagatgataaagatgtttaagtattcctttttttttttttttttttttttgagacagtgtcttgctctgtctggagtgcagtggcacaatcacagctcactgcagccttgaactcctgggctcaaataatcctcctgcctcagcctcctgagtatctggaactacaggagtgcaccattacactcggctagtaatttgattggttaagaacattaactataactcacacattttcctgaccacatttgcttaggacaaaacagtaaaagacatgagtgtagatgaaagcgataagggaactaatcttaaacactgaacctcttttcagcaaattggctttctagtttctcagctctctctttacacctctaaatctctttcctggcaagatcatttatttgccttggtttatggtgatactcttcattgttatactggtgggtgattgttttaattgatagctgtttttttctacttcaggaagatgacactgctggctctgctggctctgatgtttaccttgtggctaatgcctgtgtttgcctgtgttcacatttattccacgattcatttgttaacatttactaagctgcttttctgtgccaggaacttggctagataaataaatggttgtttttgtacacagaattagctgtcataatcagttactgtagcatttattcttgcaaaaatatatatttatacttcaactagtgatcgaatctcaacttattaattcatacattcagccagcacataattgaatacttcttatgtgtcagaaactgttctaggtgcttgggatgttcattgaacaaaatagacaaaagtctccgcctctatggaacttactttccagtgaaggtgtggattggtgggatagaaaataaaataatcaagtaagatatgtacttaggctttcataaaaatacagcagggcaagaggaccaagatggaggcagtgatcagggaatctcaatgagggtgagactgcgacaaagacttgaaaaaggtggagaagcaagccttgtgggtatttagggtagcagtagtccaggcaaggggaacaactagtgcaaaggctctaggaggcaatgtgtttgaagtgttttaagaacagtaaggaggctagtatggttagaacagaatgagcaaagggggcaaagtggtagaaggtgagatcaaagaggtaatgaggccattgtggaggcccatatggactattggaagggctttggcttttactctaaatgaggcaaaaaccattttaagcagagaggagtgatatgacttgatttcttgttaaaaggattattctagttgctgttacagaaaaagattacaggggtgcaaagaaacagggagacaaaagaatataagattttcactgtaacttatatctagtatgcttgcttatacttgaaaatgcatatccagataattgtagtaaattcaaatattatgtttatttaatagtactaacattgatatgctggttaattatgattaggagcactaataaagcacaaatcagggattcccaaaaagaatgttgaaagggcagtcagcttttcctgtgccagaaatcaaagtcatagcagatttggggcaaatatgtcaaagtcaaacttacgcacatcactactgagaagacaaagatgaatgtgtgacagtttcctgcccccaagaatctttaagcattgtgaaggaagattaatatagccaaataactagagtgatcagttctaccagagaggaccagttttggaagccagaggaaaaaaaaaaaaaacagaaacaaaatgatgtttgaattaaatctttaaaagtttctcttataaatttaccaagccacatattgggaatggtaccccaggcagaaggagtagagtaagcaagccagaaaggaaatactatggtgcttttgagtaactgcagtgtggctgaagaatgtggaaaatgatgaggataaagaggtggacagggaactaggtaagggagggcttccttttaaataattagaccttgtcctgtgtacatttaatgggattttaatcaggccataatgccaaatttctttacttcggaaggatctttatggtgatggtttcagaaagaaattaaagcagagtaacagtggttagcaataatgatcagctagtggttcccaaacttacgtatcatatgcatcttggaagtttttaaaaactcagattttgggatcctgacttagatctactgaatcagaatttacagattcaaattcccagtgaggcctaggaatttgaaatgttgaatgtccttcacgatgcagctagacaagcatttgggaataaagcattaggtgactatttcagtagactaaggagtgggaggccatttaagctcaaaggctattctacttctcactatatttctagtacctagcacagtgcatggtacttgatagatgcatcctttctcccatacctcgccctacacatctcttcatgtgtatccttattaatatcctctattataaactggtaaacatgtttccctgagttctgtgagctgctccagcaaagatgggtttgtgagaatcccaacttttgaagcctgtcagtcagaagttcctgaggccagacttgcaactcctgttgagggggcagtcttggggactgagccctcaacctgacactgtctccaggtagatagtgttagaattgaattgaaggacacccagttggtgtccgctgcagaactgattgctcacctggtggtggagagaacccctcctctcccgatagggttgcagaagttgtcttctgtgttgttgattgctgtggtgtgggagcagaggggggaaaaaagctgttggagagttttttccaaaacaataggagattatttagatttataaaaatagaatcaaagtagattaactgagcacattgtgaaatatagagtagagctgtgtgtaaggagtatatcttaatgtcaagctgacaccaaattgaatgtttgctggaacgttcaaaaatctaagcttcccaaatctgtgaaaacactcaggttagtaaacagtcttatgcaaacagcaagacaatgctcaaagccatttaaggaaaaagaacagtaactgaattctcttatggaaatgtgagatgttgttttagtaagtactgatggtgttatactttttgtttattcgtttgctggtatttcagttcctaaaattccttcaaatatgctgcaaaatacaaaccaagaacttggtggattttccatttgttttcctgtgggaaatgatggaattaaaaaccttgaggattagaccttgagagttaccttccagtgtttatgccaccattatacaaaattctggaggacaaaacccttcccacttaaaaaccagttagtttcagaaaatcacctcatgttaggagactgcatcattatagtatgtgtgttagctttaggtatagatctaaaatatttttaatattttaaaaacttaagcctttcttcattaatttggcctaatacaagttagaataactttaaaaatgagtacaaacaacaaggaagggccaggcgcagtggctcaacgcctgtaatccgaacactttgggaggccaaggtgggcagatcacctgaggtcaggagttccagaccagcctggccaacataatgaaaccccatctctactaagaatacaaaaattagctgggcgtggtggcacacgcctgtaatcccagctactcgggaggctgaggcaggagaattgcttgaacccaggaggcagaggttgcagtgagccgagatcgcgccattgcactccagtctgggcaacaagggtgaaatgccgtctcaggaaaaaaaaaaacagtttctgtgactgctagacaaatgttgagcaagtaaaacaccaacaatgttgaacttagatattgaaatagctgctctgtacaaataaagtctactgggagtatagactgaattaccatcttttgactctttcgccataatgattggcattaccggaagggattaccttgctttgaagagctgctggacagtagagcagagagcatctattaccattgtaggtgcctttcagttaggattttggatttataagcaaactccaagaaagagcctggttctgagtttctctgaatagcttaggtcaagtcctaaattctgaagccaactcctataattccttctttatgtctttggcatgtgaagtaggcaaatttcgaactttataataatagcctagacttacaaatacttgccttggtaatcaggatgagtttttgagagacaacatagtctagtgttaatcgcgtggacaccagactgcttgagtgaaatacaggttctaccatttattaacggagtaatgttgggtaagctatttagccagggtccttatctgtaacatggtgataataataaagattaaataataggtgaaaaatgtttagaataccactgtgttattagtaagcaccatgcataggtgtttggatttaaaaatactggcaaaggccaggttgggtggctcacacctataatcctcgcactttgggaggccaaggcagaaggatcgctttagcccaggagttcaggaccagtcgaggcaacatagattccgtctctgcaaaaaatttaacagaattagttgggcatggtagcgtgtgcctgtagctacttgggaggctgaggtagggagggggaggattgcttgagcccacgatttcgaggctgcagtgagcttatgatcatgccactgtactccagcttgggtgacagagcaagactctgtctctaaaataaaatgaaaataaaactgcaggcaaaaatgccaactgaagagtgaacatgaacttttctttgcatttttcttgggcctgagactttaagaagtgcagggcagttaaaatgatgagatataattctcacctatcagctcagcagaaattaataagattaaaaagatgcgtaatatataatattgcagagtgcatgggggaattgatatacacattcatgaactggcagagacaaaaatgggcacagaaccatttggaaagctattgtgtattttaaaaaatttcagtagcacattttttatatcatgaaatttcacttcagaatgtcagtcctgtagaaatactgacgcaagtgcaaaaacaacaaaaaccaacttgtaccttcaaggccagaaagagttatttcaccaaataacataattgaggtacattaactttattagaagtaaatctgataatctgctcacattttaaatagttatggtttaacttcagttcttgaagtcacatatttttacaattaggaatgctaacaggctttttgtgcaatacgaaaagatgactttaaatgcctacaattattttgtgtccttttatttttttttaatttttactgacctactacaaagcactaaatattttatgttcttaatctgaagaacaatagacattctctataaaacaactcttgcttattcatgaactttgtacacaagaagcttaataagacgggctcaaaattatttttctaaatatatttcctatacaaaataatttcaagatataattgttacttttgtgtctaatactgtatgttaaataataaaatggtaagcatgtaaaaactacaataccacaaagattgagctattttgccagtagtatactccaactttagttctagaacagttgtagaaatgggtaaacaaactgttttaactgtactcttaactgaaatatagtaccttatgcagtagcagaacatatcagcagaagaacttcacttgacctgtacttaaaaacaaaacagatgcaatttataaaatttagagaaatatagtgaccttatttgcatgtggaaaatgtacttctttctgatctacatatcttctgttgtgcaatgtaagcagtaaaacaaatagtacaggattcatctctgtgggacctagaccccctggtctaacaaataattcttggtcagtactgtaattctgtggtataaaactgataaaattagccttcctgtgactagacaagaagccgggcagtttaaatgctgaaactcacaagaacttcagaagctttagctttaagctttaagcttacttagaaatgttataagacctccagtagtcacatatgaagaatatcatgaagatttttccattaaatctttattatagatcccttgattggtttctgtctagactcattgtgtgataaaggacataataatttttatcaccttcatctaatataggtttgtcaactctatattagttgttttcttgaaggctggttttcttccaaaattcagtcttattttcagtctacactagcttttaaatatactgtcctttagatgctttatctaacctcaaatttctaatggatttgtcttagacacttattgccactccttagatagtcattgctatctttgaagttctggacgatacgtgtattacagaggaactggagacattccatcaccatagttagcttgattggataccctttaaaagcatatactcgcgcctgtaatcccagcactttgggaggccgaggcgggtggatcacttgaggtctggagtttgagacaagcctggccaacatggtgaaacctgtctgtactaaaaatacaaaaattagcctggcatggtaccacatgcctgtaatcccagctactcaggaggctgaggcaggagaattgcttgaacctgggaagtggaggttgcagtgaaccaagatcttgccattgcactccagcctgggtgacaagagcagaactccattaaaaaaaaaaaaaagcatatatagcacatattataaggttttcaattttttcaccaagtgtttcatttgggtagtcatttattggtagtttacatcagttgagtggttcagaaaaaatacagtaagttgcttataaaattctgaacactttggccaggcacaatggctcaagcctgtaatttgagccctttgtgaggctgaggcaggagaattgcttgagcttaggcgttcaagaccagcctaggtaacaaagaacgcctggaatgattgtggcatttgaactaatattcaggtttaacaagagataattgaccatcactctattttagaggctttatttgaaccagatagaaatctatttcccacagctatcactgcctgtcacctacaacttaagggggttggggaggaagtgagagattttctgttagggccaatagggacctgctagatacccccccatcctgggaatggtgtatggaactccagtgtatgctggagttattatcatcatacttgtttttttattttactcttctgcttatacagatcaagtcttacgttttatttttaagtttaaattgaaaacatttacagagaacaatgcagtgaaatgaaaaaattacagactgctggcatttgcattttcatgtagcctcagtgactaatttttttttattgtacagcattgagaaaatcctagttcatataactagttatagttcatatagattcatataactagttttaagtgataatagtttcttcctttttttcctccaccatctaaccagatgaagataatagtttttaatagctcaccgtaaatttcaaggtactcaagttaaattgatctagatgcttgagttgaaatttttctatcaaagttcaataacatgcttacattccttattaaagtataaaagtcctataaacacacaaacttgagtaagtactaaaactagtatcagtattgtcacaatacaacatgttatattgtaacaagagcatttgctgagaactgtgcttgttactccagaatgttgcttctatggttgtacctttcaactttgcagatcatttggaaggaggagagatttggggtggagacaattcggtacttcattcacaggatgtaaggaggattaagtaaaataatgctggctaaaagtccttatttagcatactgcccaatgctcactaaatcataatagctgtttttaacatttggtgaagaatctatttaacaggagtgagttgaggggcataggagatcatgtgagtgtttaaagtagaagcagcattccccattaagaagagaaatactgtggaagagcaaagactttaaaacacctgggttcaaatcctatttgctacataatggctacttttaacctattgaacgccagttccctcatttgtaaaatagggacaatatttaacctatttacaggttgtgagagaactaggcacctagtacagggtaatgttggcacatggtaacctttaataaactgttgctattcaacaagctattagatgtcactaggcagttaagcaaaggaagacagcttttgcttggtgtgacaatgaaaatctttctgatttccttcttggaagagttccctgaagatatgtcattgtattgacacctttatttttgctaacctatccctctaaattctggatattgtgtgtgccacagctttttttcttccatattcctgcatttatttggcacctgttgtgccagtaatagataaggggctgctaagggaggaggcaacctgcactggcttatagctgctaatgtcagttcctatagcttatcgtcagtgttattcatgtggtaaaagggtgagaaagtactggagtctaaagaaacaagtagaaatcagtttgtagctattaccgttctacctgctaacaactcctgttttcaagttattatgtacaactttaggtagtttctctagccttaatcgtggtttctctgtattgagactacttttgaattctatgaagtacagccttagatgtacaggctactttaaatttttgcctaaaataaaaacattctctccaattacatatgctggggaggaaacacctgcttccgacaggtttaaagcttggttttggactttttgtgagagttccttatgtgtgcagtaatccaaaatttgtatagttgccctttataaaagtacattaatctagtagacaaatctccatgtaacttaattacatggcatcttctaatccttctgtgataagcagaaatgtaaagttttattcaagttaaggcaaactaacttgtatacactttccatctcgtgtttttcttgttgttgttaagtaggataagttctgaacgtcgaaaagaaaagtctcgagatgcagccagatctcggcgaagtaaagaatctgaagttttttatgagcttgctcatcagttgccacttccacataatgtgagttcgcatcttgataaggcctctgtgatgaggcttaccatcagctatttgcgtgtgaggaaacttctggatgctggtgagttattttacaagggtataaataggcctgaaaattagaagttagaagtaaatagaaattatttttagaaggtggtcgcaatgttttgattttgtatacctctttatattgtgatatgtacacgtttaaaaatttttctgtaattctcactatttttatcaagcttcatttttttctcatcagttattctttgaaataatcattctttatgcacataatttgttttgctttattctcttaaacatactctcaattcttttctaatataacatcctttttattacctgcttttaaagctttagtcaggaataagatactggcttttcccctcccccctttttctcctgttccatctacctttcttcctttaaaaaacatgactcaggccgggcgcggtggctcacgcctgtaatcccagaactttgggatgctgaggcgggtggatcatgaggtcaggagttcaagaccagcctggccaagatggtgaaaccccatatataccaaaaatataaaaaattagatgggcacgctggtaggtgcctgtaatctcagctactagggaggctgaggcaggagaattgcttaaactcagagggcggagcttgcagtaagccgagatcaagccactgcactccagcctgggcggcagagtgagactccatctcaaaaataataaaataaataaataaataaaaaacattactcttctttcttcttctatggtttgctttgctgcattactttaatcatgaaaagcagctggcacatctaattatagtttttctagcttctggcctgcacttttctgtgttgaaatggctgtatatattaaataaagtgtctgcgagaaaactttgtaaaaacatctaaatattatatcatttaagtacaactttttaactaattattttcctcttcttgtgccctttttaggtgatttggatattgaagatgacatgaaagcacagatgaattgcttttatttgaaagccttggatggttttgttatggttctcacagatgatggtgacatgatttacatttctgataatgtgaacaaatacatgggattaactcaggtaaaatgcacacatattaagagctcttctatatgtttttatgattttatgatctagccctaatttttaaaaatgtgtttacagtttgaactaactggacacagtgtgtttgattttactcatccatgtgaccatgaggaaatgagagaaatgcttacacacagaaatggtaagaaaagtctgttgtttgatttaatgtgacaggtggttttacataataagatactattgctaattattaaactttgctattgtacttacccaaggcaaaatgttatttcatgtttaataaaatgtctattctttgttaaaactattattttagtttttaggaatttcattttgaaagcccacctaattgcataaataattgtgtgggtgtgagaaataaaatggaaaagtaaaatcatgaccaagagagttacaaataactttttttttttttttttaagatggggtctcgctcttttgcccatgctggagtgcagtggcacaatcagctgactgcagccttgaccgctgggactcaagcgatcctcccacctcagtctcccaagttagctgggaccacagacgcgtgctaccatgcccagctaaatttttaaaaattatttgtagagacaaagtctcactatgctgctcaggctggtcttgaactactgggcttaagccatcctctcacctcggcctctcaaagtgttgggattacaggcatgagccaccacgcccaggctaccttttttttccttttctttttaaattgtgataggggttcttgctgtattgcccaggctggtcttaaactcctggactcaagtgatcctcctggctcagcctcccaaagtgctaggattataggcatgcgccaccacacctggtggagttaaaaattaaaatacaccattaaggcaaggagaaattataatacaaatggcagataataggactttagacagtcattaaagttgaggtgccagtttgagtctaaggcccaataaaaaaagttcaccagaattttaagacaaacaactgcttatttgacttctttggatgttctcaataattcgagaccgtgtagttagattataaagtattacattgtggatgcccacatattaacaaaaatagagagtaagacctctaattcttaggaattaattgttaaaaataatcaagtgttccaagattttttggaaactacctcttgaattaaaaaattaaagtctttctacatttttatcttgttaaacagtgtatactgatcataattatttaaaaaatcatgtgttctaagatttttggaaagtacctcttgaattacaaaaacaagaaagtctttccacatttgtgccttcttaagcagtgtatactgatcataattgaacttttcttcatgatggaaagttaccacaaggaaaatttcttatgttctgctgttctttgttgctctccaatttaagtgcatacgtttgtttgcttctatattataaaacctcaaatttactttttgtataatttttgaggttttctttttcatctcatttattataataatagctaacctccattgagagaatgctgtgtgccaggacactgttcttcctattttatatgcttttaactcctttattcctcacaacaaccctgtgaagttaactgttagacaatttctattttactaggaaactgaggtacagagttactaagtaactttcccaacattatttggttagtaaatggcagagcttgggctgaacttcagtagactggcttcagagtccacgctcattagtcctttggagcgcttttcatattcttgaattctcacattctgtcttttttcactctgtcagcaggacctgactcctgtttttaaatttcatattgtgtttttactgttaatttggaaaacaaatgcatactttttagaattctgtataaaggaggagtaaatatgctgtgaacaaggacctaagtgggttgtcaatgagtttaatatatgagttctaatgtgcagagttgaggtttatattgactgctcagtgcttccctggggctagactataaatggatggatattaggaagtcttgttctgatttggtaatgatgttaatgcattattctaaatcagatagtcttaatatagtttaaatgtatgtttcgaaccaaatgttcttttttaaagcacacaaacattttgaaatcattactaatgtggttaatgaattattgatgttccattgggaaactaaaatgcagatttttctcttttagaaatcagggactattgcaaagcatcacattttagtgatacactgagagccagtggtgtgtttatacaaatagtcctattttccaaataaattctagaaaaatgctttagaatttataaattatacaaaatatgacttatttttagagagtttaaaatttaggtttttttaatggtttgtttttgtttgtttgttttttgttttttttttcctcattaggaaaacactagtacttttcagttaccttgatttttaaattaatctgcaggtccccattcaaaggccttgggttcctttcaaaggtcagtataattcaagcttagtttatgaaggactgaacatacccaaaggattttgcatgtggatctttactgccactaccacaaccatcaacacctacacacacacgacacacacacattctctctctctctctctctctctctctctctccccctccctcccgcactccttcccttccccctcctttgctctcatggcatcttttaaaaatatactcttaaatccttccagggagggcaaattcacttcttaatctaagtaaacccaaatggcatgcatcagcaccaggactgcccatctttcctagttccattattcatagagtataggctggaattcatcttgttcctcaagagtccagcatttctagttaaccatgcctacatttaaacttactctcatttcttttctactttacagtgttttttcaatatactagcattacagtttccagatttgatttctctcctgtcttatttccatcagttttcaagtctattaagattctacctcttcatttgtcttttgccaccattcttttccctcatactctactggctcagccctctcattacagtcacctaattctaacatatatattgctgctaagttaattttccttaagttactgattgtgcttttttaaagccccttgttgaatatttaggcaggactccatgtggacatccacagccctccgtggtacagccctaaccttcccttctagctttgccttactactcttctacgtgtactctacattgtggacaaactactatatgctgtttttcaaacatgtcctatttttcctacctctgtgcttttcattctcttacttctccttggaatacccttctaacccatctctacttactgacattctaatgtctctttttctaagcaagacttcttgatttcccttgactagaaattatcttctaagctctccctatccttctttaaagcatttttataagtctcaagtaccaactctacattgtgtttttgttgaccttactatatctactacatttttaacttcttcaggaaaggtggcgtatcttactcatctttgtattgcctacaatatctagtccaggttctgaataataaatatttttatatgtgttctgaagcacactgaccaatgaagataagaaatcaagaggctagttccttattttttttaatttttttttttgagacagtgtctcactttgtcacccaggctggagtgcagtggcacaatctcagttcactacaacctctgcctcccgggttcaagtgattctcacgcctcaacctcccaagtagctgggattataggcatgtgccaccacacctagctgatatttatatttttagtagagatggggttttgccatgatggccagcatggtctcaaacttctgtcctcaagtgatcttcctgcctcagcctcccaaagtgctgggattacaggcatgaggcataagccactgcgcccagcaagatgctcttttctcagtcacctaaatataatctcatttttagttatagaaggtttgaaattggagtgaatagactttacttaattctgactttatttctgtagctttttttttttgagatggattctcgctctatatcccaggttggagtgcagtggcacagtctcagctcactgcaacctctgcctcccacgttcgagtgattcccctgcctcagtctcccaagtagctgggattacaggcacccactatcacacccagctaatttttgtatttttagtagagacagggtttcaccatgttggccaggccggtttcgaactcctgacctcaagtgatcctcttgcctcagcctcccaaagtgctgggattacaggcatgagccaccgtgccctgcctatttctgtaacttttgataagtcatttgatctgttgttgttgttttctcatagtaacaaagtagaagtaattttctgcctgctttactagataaattaaggggaaaaaaataagatacgtaaaaatgttatttgttattaaaaagaaagttgttattttaaaggttctataaagacatagagtgcttattagaaattgagctaacacattcaggaaaggataggaagagtttgctgaagttctttctttagggattcttgtgtaccgatagcacagttaaagagcaaactcataccatttttatatttctgtgtatttgactaagcttactggcttcaatgattaactgttatcccaaatatggattatctttcagccaactcagggaatcacagctactgagtagtgtgtgtcagatctcttgggtgtgctggagtgagtaaaaggggaatgaattactgtgttcatgctgagacttaattgaacgggtattcagttgatctaggtgatgggcactttgttacttttattgtaacaaatttgtatatttagttgctttaaaactttatttcatgctttcattaggccttgtgaaaaagggtaaagaacaaaacacacagcgaagcttttttctcagaatgaagtgtaccctaactagccgaggaagaactatgaacataaagtctgcaacatggaaggtaagtgaaaattatttgtgattgattatacactttatttatacatagacattgtagtattaagataactttagaattgtgagggaaggtttacagttccatggtgtttggttatgtaacatttatatcttcaactcatttgcatgtgatctccaaaatgcagaaccgtgtagtaatttgccaatttgaggcacaaacttaaattacgtgaattgtggcactggtgttccaggcttaatcagttggctttgccagccacacaatatttgaatcctgatagggcttaattttctattaatcatggttttatatctttgttcaatgttgaaacatagtcatcagtgcaagaaataactatcaaacagccatgatgatgagatgaatgaaaaagcagcctagactttatacgaggggaattttttaaagagtaatgtataggccctgggcaggaagtaggtcataggtggtatcataggaaaaatgttcattgattttcaaaaacgtgattaatccactagtgacagtaaattttatcaaagcttactggccatgtcagactcaactacttatctctgctttttttttccctagcattgtaaatattttttttaactgctttgttcttcatacacaggtattgcactgcacaggccacattcacgtatatgataccaacagtaaccaacctcagtgtgggtataagaaaccacctatgacctgcttggtgctgatttgtgaacccattcctcacccatcaaatattgaaattcctttagatagcaagactttcctcagtcgacacagcctggatatgaaattttcttattgtgatgaaaggtaaattagatctaaaatgtgaatttgaaatttttaattagtctacagcattactgaatattcaccatagcaaagattcagcgctggccatgcatggtggctcacacctgtaatcccagcactttggaaggctgaggcaagcggggggtggatcatctgaggtcaggagattgagaccagcctggccaatgtggtgaaaccccatctctactaaaaaatacaaaaattagtgggacgtggtggcaggcactactcaggaggctgaggcaggagaatcgcttgaacctgggaggtggatgttgtggtgagctgagctcacaccaccacactgcaagcctggatgacagagcaagactcccatttcaaaaaaaaaaaaaaaaattactcaatgttaaactatactttccactaaattgaacagaatgatacatcctataatattagattaactttgtaaattaattcagccacatttattgaacatttactc

SEQ ID NO: 959 - DNA, 32742 bp, Homo sapiens
  source 1..32742: mol_type = other DNA
atataggcggggtctccccgccgcaggggctgggatgctgggggctgctgaagccgccatcttggattccgcggtagcggaggcggcggtcaggcgccgcttctggggagtggcctttcttttcccctccctcccggttcggtggcggcggctcctcccactgggggggggggtggcgcggcggcggtggcatctgcggccatggcggcgactactgccaaccccggtgaggagacggaggactggggcgcctctaaaggggaggggccgaaggggctgacaactaaggagacccagggctgaggggacgcagctggagctgaaggcgccggggcggggcgggggccgcgagagacggtgggggagcggtgacctggggaggggcccgatcccggggacttgggtagactcgagtatacccaagggagcgagggggcaggtgggagttgaggggggctccctgtcctgacctccgttggagcggcagccagtgcggggctggcccgccctcactcctcggtcggcgtctggtctgtgatgtggtcctcttttaaccctctgcccgctggagccgcttgatgccgaaaactgtaggcagagtgtctcggtttactttaagagtagtttggattcataaaccctggaccacactgctctttagttgaggcgttgcttccaaacatttaaaggtttagattttaatttaaaaaataaaaaatggacattctttgatatatacgacgtttctttaggctgttacctcccacccgcaacccccgtccccgtctccgtccccggactatactttgaaacttagatcttgtgttaagagggcctgtaggtctttgcctgctgagggcaggggtttgtgtaatggttatggttccggacaggtctttagttccacagccccaggtttaaatcttgttaggcctacgtcgaggcaatttccaaactctttcagaaaagtttgattccacaccatttctcaatttcaaaaaataatcaaatatcaaaaaggtttggtctgttttgtctaagagatggagtagggtgtagtgcagttctagagagatcagatcttcaaattactagtcccagccctctttcctctatgttacagttattcctctttagaaggcatttcattttaggggtctagtttatcttggagaccttggttattcttgccaaataaagtctatccttttccaaaaaccaatatatttgatagccttaaaaagggccttgagatatgtgtgtgtgttgcgtggggcggagaatttcttgaaaataaaacagtaggagtgattacccccatccccacgttgaaatttaaattagattttttttcatgttactgaaaggcagtatgattttgcaatatccagattttgataggacagttgaatcactgaaatttcttttctaccgtgtttctgggaatagctattttaagaaatggttaatttgtcacgtcatttttttttaatcttttaaattttttttgaaggaaagggaggtaaaattaatcgcaaaaattacattgcaggaagtgctgagtgatagaataaaactataaaacaggaaaaatgccgttatgtcaaacctgaccttgtagtaatataacctatctgtgaactatggaataaataaacaagatttttaactgatcacacattgcaaaatacttatataaccctagttaaattgcaaagcatttctcttattaagaagtggcctgggtaaacaagttttagttcatatgtcagaagcttttttccagctgtgtgggtggggttgctttattttgttttgttttttgaacaacagcaaccagaatgacagcctcttgaccatattttcataagctgatcaatatcagcttaaatcttagcagaaaatagcatatgttagtgtgtatgtgtgtgtgcagaatccttgttaatgaaacagctttgtttactatgctttggctgcttgcttctgcaatttttagatttcctttttctttttctttgttttcctttctcctctcccctctctcctgtcccctctcccctctttttcttttgctacagggtcttgctccttgctctgtcgcccagtctggagtgcagtggcaagatcactgctcacggcagcctccacctcaggggctcaagtgatcctctcacgatcagcctcccgaatagctgggactacaggtgccttgccaccatgcgcggttaatttttaaatttttttgtagagacagatgccttgctatgttgcccatgctgatcttgatctcctggtctcaagcaagccttgcctcagtctctccaagttgggaatacagatgtgagacactttgaccagatttcttttttgatgttgaaaaattattccatctcttctgacttattgatcccatgttcagttcaatcaaatcagaagatatattttcttttttcttttctccctttgctcttgtatatcatgaggaagagatcagagatacattgtggattttttcagtagcctgttgctttttgggaaatgagattaatgaatggagggacataggtggaaatgtactgtgcttagtgaaagtaaatgttttcaggtcagaattctttgctacactgtcataccttctttccttagagccattttaaggactagggacaccatgcctatttctttgagttttttctactttgtatttttgctggagtactaatttttttttttttttttttttttttacaattcttgttagttttgtcaagattttaaaaaatatttcactctttaaccttcacttcagttaatcctttttaaaaataatacttatttttatttttcagacaggttcttgctctgtctcccagactgtagtgcaatggtgtaatcacagctcactgtagccttgaactcctgagctcaagtgatcttcccacctcagcctcctgagtatctgggtctacagacacacaccaccacacctggatacattttttaactttttgtagaaatgggatcttgctatgttgcccaggctgatcttgaactcctgtcctcaagcaatcctcccaccttagcctcctaaactgctgggattataggtgtgagccactgacccggccaagttaatccttagggttagtaatagtgcttgaacatgttaattgtgctggtggccctgcagtgtttttcaaggggaccacgttcttctgcatttttcactgtggtgctgcattagaagaagagtaaaatatggttggtactctctaagagttgtgttgaagtaatagttctgtgatgattttttttctcgaattgataattcttcatattctatcatttttcactagttctacttatcactggcaagtagaactcggtgggtaggtggtccatgaaactttaggctgtttcttatctatggactagacaagttttgttttgttttttttttgtttgtttgtttgttttgagacagagtctcactctgtcgcccaggctggagtgcagtggtgctatcttggctcactgcaagctccgcctcccaggttcacgccattctcctgcctcagcctcccgagtagctgggactacaggtacccgccaccacgcccggctaatttttttttttgtatttttagtagagacagggtttcaccctgttagccagggtggtctcgatctcctgaccttgtgatccgcctgcctcggcctcccaaagtgctgggattacaggcttgagtcaccgtgcccggcccggactagacaagttttgaggaacacattttttttccccataggagagggtcttgctctgtcactgaggctggagtgcagtgacacaatcatggctcactgcagccttgaccttctgggagcatgtgatcctcccacttcagcctcctgagtaggtgggaccacaggtgtgcaccaccgtggctggctaattttaaattttttttagagacagggtcttgctatgttgcccaggctggtctttaactcctggcctcaagtgatcttcctgcgttgggcactccccaagagctgggattataggcatgaccaccatgcccagccaaggtggaacactttttaaattgaatgtgtcatttgtaatgcattggctgagggaacagttgggaggagattaggtatttgatttacaattccaaattcaaactagagatgttgaatgagtttgtagtaagtgtaggtttttatctctcttgattctggtattctcattagcagagaattctttttgtgctattatgtacaagttactgtggatgaagaatgtagaaggaaaagggtaataccgtttgggtttgtaaggctgtcatttaggaagaaaattttttttagctaattttcacctatataacttagttttaactgcgtcaattaacacaattcttacctgttacctttatttacctttttcagatatgggaaaataggaattcatgcaatgtaaagttaagatgtcaagatattcttttatggccaggtgtggtggctcgtgcctctaatccctttgggaggccgaggcaggccgattgcttgagcccaggaatttgagaccagcccggacaacgtgacgaaacccctttactacaaaaaatacaaaaaattttccgggcactgtggtgcacttctatagtcccagctacttgggaggctgagatgggagtatcacctgagcctggaaagttgaagctgcagtgagctgtgatcatgccactgtactccagcctgggtgttggagtgagaccctgtcccccaacaaaaaaagagatagtattttattatattgcaaaggcctttttttttttttttttttttttttgagacagggtcttactgtgtcgcccaggctggagtgcaatggcgtgatcttggctcactgcaacctccgcctcctgggttcaagctattctcccgcctcagcctcccgagtagctgggattacaggcacctgccatcacgccggctaattttttatttttaatagagacagggtttctccatgttggccaggctggtcttgaactcctcacctcaggtgatccgcccaccttggcctcccaaagtgctgggattacaggcgtgagccgccatgctccgccgccatctgtttttaagaatgctgccttggccgggcatggtggctcatgcctgtaatcctagcattttgggaggccgaagtgggcagatcacctgaggtcaggagttcaagaccagcctggccaacatggagaaaccctgtctctactaaaaatacaaaaattagccaggcatggtggcaggtgcctgtaatcccagctactcgggaggctgaggcgggagaatcgcttgaacctggaaggtggtggttgcagtgagctgagatcgtaccactgcactctagcctgggcgacagagtgagactccgtctaaaaaaaaaaaaaaaaaaaaaaaaaccacgactgcctaatatgccataatgactttagtaagtagacatcagtgaatcttcaggttggaaatatgacaacacctatcattttacacttaaggagacaaacccagggaaaggagtggataattaagttccttctatatgccaggctgcactttcctattttgttgctaatctttatgtctagtctgtagcaactgtctccaacttttcacataaactcttcaaatttatgtcacttttcataatttcgtcaatgtattttcttgttttaaagtttttattattttagatagtgaccgggtctcactatattgccccggctggtctcaaactcctgggctcaagcaatcctcctgcctcggcctcccagagtgccggggttacaggtgtgagccaccctctgaggcccattttatattttccctccacgttttcattgtagttgaatggacaagtaagtttatggattcaacagtatacttagggctggacatggtggctcatacctgtaatcctagcactttgggaggctgatgtaggtggattgcttgagcccaaaagtttgagaccagcctgggcaacgtggtgaaaccccatctgtacaaaaaaatacaaaaaattagcagggtgtggtagcattccctgtagtcccagctacgtgggagactgagatgcgaggatgacctgagcctgggaggttgaggctgcagtgagccatgattgtgccactgcattcctgtctgggtgactaggagacagagtgagaccctgtctcaaaaaacacaacaaaaccagcatacttaggatataagttccatgagagcagaacttttgctttccttgtttaccagagcattgcagtgcttacagtgggtgcctagtatgttggattagagttcaatgtatgtttgtggaataaaaatgaatgtaaaacccactgttaatatgaaatacctttgaagggataaaactaattaagccattgacatcatgaatttgtactaactataataatatctaatatttattagtaatacttaccagctgttctcatttaatttttataacaatcgtattaggtaagtattattattcttgttttacagatgaggaaactaaggcacagagagtgaataagtaacttgtctgaagtcacatagctactagaagttagagacagaattttattgttggcagtccatctacacagtcatcattcttaatctccaagttatgattttttccattgtgacttagagtcaccttcctactgaaatatagtacaatggatatcttttgagaaggaggtaggtggagtattgtcttttttgtagatgaaaagggtgaaataccacattaggcagcctgggggcaaggcattgcttggttggagaaccaagtgcaaggtgctaaaaaaaggagctagaacagtagtttccaggctgagtgtggtggctcatacctgtaatctcagcactttgagaggccagggtgagaggattgtttaagcccaggagttggagaccagcctgagcaatatagggagaccttgtctccacaaaaatatatataaaaaaattagctagatgtggtggtggatgcctatagtcccaactacttgggaggctgaggtggtgggaggatctctgagcttgctaggtcagggctgcagtgagccatgatcatgccactggactctaatctggttgacagagtgagcccctgtctctaggaaaaaaaaaaaaaaaggagtagtttcctaaaatcttttctgtaacattctataattcttcattttgttttgttttgtttttttgagactgagtgtccttctgtcacccaggctggggtgcagtggcacgatctcagctcactgcaagctccgcctcccaggttcacgccattctcctgcctcatcctcgcgagtagctgggactacaggcatccaccaccatgccctgctaattttttgtgtttttagtggagatggggtttcactgtgttagccaggatggcctcgatctcctgaccttgtgatccgcccacctcagcctcccaaagtgctgggattataggcttgagctagcgcgcccagcctaacattctatatttctttctcctagttctatgtttcaattctttaaatacttttaagggtttttttgagacaaggtcctgttgtgtcagccaggctggagtgcagtagcgtgaccatagcttcctgcaacacctccaattcctaggctcaagcgattctcactcctcagtttcctgaatagttgggaccataggtatgcaccatcatgcccagctaattttttaattttgtagagacaggatctcgctatgttgcccaggctggtccttttttttttaaattttattattattttttgagacggagtcttgctttgtcacccaggctggagtgcagtggcgtgatctcggctcactgcaacctctgcctcccgggtttaagcgattctcctgcctcagcctcctgtagctgggactacaggcacgtgccaccgcgcctggctaatttttgtgtttttagtagagacggggtttcaccatgttggccaggatggtctcgatctcctgacctcgtgatctgcccacctcggcctcccaaagtgctgggattacaggcgtgagccaccgcgcccggcctgcccaggctggtcttgaactactgtcctcgagtgatcctcctgctgttggcctcccagattgctgagattacaggcatgaatcatgcactgcagcttttaggattgttattagaatcctctacaagttcttgatactccataattgagcctctcctagaaacttggtttcagagacactgttgctaggtctttatcactgattgttccttctttgtcctttttgcttatctttctgcttgtttctttctcttgttcagtatgcttctacttttctcttctcacccttgaggctaggactcttctttgagacagggtcttgactcttttttgagacagggtcttgctatgttgcccacgttggtcttggattcctgagctcaaatgatcctcccacctctgcttcctgagtagctgggattacaagtgtacaccacagtgcccggcttggggctagaactaaatagtaaaccaagcagtttccttcatttcttcccatttgcccacctacctgcctttctagctgcttgccttcctacttcaatttgacattcacttggtacctaccatagtcctcttccctttgtattagtccattctcacactgctataaataactacctgagactgggtaatttatgaagaaaagaggtttaattgactcatagttccgcaggctgtatgggaggcagggctggggaggcctcaggaaacttggaatcatggcggaaggcgaaggggaagcaagcatgtcttcacatggctggcaggatagagggagagaaggggaaggtgctacacactttcaaacaaccagatctcttgagaactctatcatgagagagcattaggggaatggtgctaaacctttggaaaccacccctatgatccaataacctcccaccagactgcaccttcaacactggggattacaatttgacatgatatttgggtggagacacacagagccaaaccatatcaccctttatttatcttttatgtataaaagactccaaaaatttcattcctggcttctcacataaactactttcctatatttttatctatttaaaagatatctctctctttttcttttaaagttgagacagggttttactatgttgcccaggctggtcttgaaatcctgggctcaagcattcctcccacttcagcaacctgagtagctggactacaggtgtgtgccattgtgcctggctgcatctctgtttgaatagttttttttttttttaatttatagaaatgaggtctcactgtattgcccagactggtcttgaactgctgagctcaagtagtccccccatcttggtctccctagtagctgggattataggtgtatgacacgatgcccagctctatttgagtaatctgtttttttttgttgttgttgttttttttaaagacagagtctttctgtgttgcccaggctggagtgcagtggtgcgatcttggctcaccgcagcctccgcctcctaggttcaaatgatttttgtgcctcagcctctcgagtagctgggactacagtgtgccaccacgcctggctaattttttgtatctttagtagagatggggtttcaccatgttggccaggctggtcttgaactcccgtcctcaagtgatccacctgccttggcctcccacagtgctgggattacaagtgtgagccattgcgcccagcctctatttgaataatctttaacatcctatatatgtatgtactcaccagtatttcctttaaatctgctgttcttcctacctttctgtatctttcatcactatcacaattcagtttttcatttccccaggctaaggaactataagtgtttggattttattttttatgtgtttatctgggttattaactcttctcaggtcttttgccaaatatacgtgtgtgtgtgtgtatatgtatgtgtgtatacatacatatataaaagttatttaaatcaaaactatacatccatatattaatatttaaagacttagatagttttataaaatgtttgttacaaaaaaattataagggagtcctctgctccctttctctcatttccttctctccagtggcatcatttttatttcttttaacagaattctttgtttctgtttaaataaagtgtcccagtgaaagacattagtttccagatcaaaggggctgtgcacacatcaaggcccattatgctgaaatttcagcatcagatagagaatatcctataagcttcagagagaataagattattcacattcaaaagattcaggtatcagattggtcttttttctcagtagtcatgctggaaagtagaagaccttggaacaggctgactgaccttggtggctcacgcctgtaatcccagcattttgggaggctgaggcaggtggatcacctgaggtcaggagtttgggaccagcctggccaacatggtgaaaccccgtctctactaaaaatacaaagattagttggacgtggtggtgtgtgcctgtagtaccagctacttgggaggctgaggcaggagaattgcttgaacctgggaagcagaggttgcagtgagccgagatcacgccactgcacaccagcctgggcaaaagagcgaagactctgtctcaaaaaaaaaaaaaaaaactttggagtaatgccttcaaaattctgagggaaaataaattctaatttagaattccatagctaggcaaactatcaattagtgaaatagaagaaatattttcatacatccaaggcatttcttacaccctttcaggaatccactagaagataggctctaccagtaggagatagtaaaccaagaaagtggagatacgaaatataggaaataggcagtataacacagaagaaaaatgaagcatgtagtatgcatacattggtgttagttttcctgttttcagtacgggtccctcactttcacctttacgtcgtgttcactagactgtaagacctttgatttatactctccagagagtaaatctgtcttttgacagaatggagaggggtagttgccttggttagaaggaatagagaaaaggatctaggaatccatctctgtagtaaacagatgctgaactaattctccttattttcacttcattcaccctaccctgcatacccagagttacctggactcaccagcttctgagactttggggaattccatagcgtaaattgagttggttttctgctttttcccttgtcagtttaggatttagttcttgtcgatctcccaaggcaatagtccattttatctctagtttcaaaaaaattattgctcttcttctcttattctttccatccttgtggttttatgtcttgtgtaaaaatttttgcttttaaaaatttttttcctgtgtgtgagtgaagagagaagagagtagaaatagatagatacatttaattcactatccttactcagaagttgcatagtttaaaattttagaagtaactaccttttcgttgtgccatcctcatttaggcctttatcaccttgttttttttattaatcttgtcttcctacttctattacttcaaactttaaatctgtcagattaattttaatttatattttcatcttgttactcagacttaaagttatatgtttgtctttgttgaatctgatccaggtgtttcatcgtggcattcaaagctttctcttggttagcacttgacatcttaccttttataggtctttttctttctttttttttttttttttgatttaaagaaaaccattttgttttcttcaggggcaattttttttttacattccaccacatattatttatatgtttatcatatttcttttatttatttatttatttatttatttattttttattatactttaagttttagggtacatgtgcacattgtgcaggttagttacatatgtatacatgtgccatgctggtgcgctgcacccactaactggtcatctagcattaggtatatctcccaatgctatccctcccccctccccccaccccaccacagtccccagagtgtgatattccccttcctgtgtccatgtgatctcattgttcagttcccacctatgagtgagaatatgcggtgtttggttttttgatcttgcgatagtttactgagaatgatgatttccaatttcgtccatgtccctacaaaggacatgaactcatcattttttatggctgcatagtattccatggtgtatatgtgccacattttcttaatccagtctatcattgttggacatttgggttggttccaataggtctttttctttacagctcttcacagttgctgttatgtgtcacctaatgacactttggtcatcaaaggactgcatgtatgatggtggtcccataagattataatggagatgaaaaattcctattgcccagtgacatcatagttgtcataaggtcttagcacaacacattactttttctatgtttagatacataaatagttaccactgagttatagttgcctacagtattcagtatagtaacatgttgtacaggttgggagtaataggctgttactgggagtaataggctacatataggtatgtaggctatacacctacatacctaggtgtgtagtggctgtaccatctagatttgtgtaagtatactcaatgatattcacacaatgttgaaatctcctaatgacacatttctcagaacatatccctgttgttaagtgatacataactgtattttcatatctccctttagacttgctcatgtacttttatctatgtggaatgcctttttcttcttctttactttttttttttgagacggagttttgctcttgttgcccaggctggagttcagtggctcgattggctcactgcaacctctgcctcctgggttcaagcaattctcctatctcagcctcctgagtagctgggattacaggcgcctggtaattttttatatttttagtagagacggggtttcaccatgttggtcaggctggtctcgaactcctgaccttaggtgatccacccacctcggcctcccaaagtgttgggattacaggcgtgagccactgtgcctggtctcctttactttttttaaggcccagtttgatttacctttttgaaacttccccatgggctggttgcctgccttctttatttcctttagtttcctcttcatattgagcatcttctctgcaagtactatgccaggccttaatttaaaccaggattatcttctctgaatttacctggcactcttttttttttttttgagacagagtctcattctgttgcccaggctggagtgcagtggcatgatctcggctcactgcagcctttgcctcccaggcgattctcatgcctcagtctcccaagtagctgggattatagacgtgtaccaccacacctgactaatttttgtatttttagtagagacgggattttgccgtgttggtcaggctggtctcaaacttgaccttaagtgatctacccacctcagcctcctaaagtgctggggttacaggcatcagccaccgtgcctggcctccatggtaatctttttttttttttttttttgagacggaatcttgctctgtcacccaggctagagtgcagtggcacgatcttggctcattgcaacctccgccttttgtgttcaagcgattcttctgcctcagcctcccgagtagctgggactacaggtgtgcgccaccatgcctggctaatttttgtatttttagtagacacggagtttcaccatattggccaggctggtctcgaactcctgatgtcgtgatctgcctgcctcggcctctcaaagtgctaggattacaggtttgactccatggtactcttatatcctatataaacgtattactaaaagtatgaacttttttttttttttttttttttttacagaggcaggatctcactatgttgctcaggctagttttgaactcctgagctcaagcaatcctcatgccttgacctcccaaagtgctgggattataggcatgagccactgcacttggccctgaacttttttttttaatggaaaaagtgttttttcttaggaaagtaacatatgcttactatttcaaatttataggctgaaatagaaaaattagcagtaacataaaaatatactcagccttaatgtatgttaaactaacagtggtaattgttttttaccaagaaaatgaccacaaatttgaaggattcccaaaacacagtgctgttggaggtatggctaaattgatgcagtggatgaggctttaaattggtataacctccttggcaggtaatgggcaatcagagttttaaatgtgtctacccttaggcccagggagtcattttcagaaataatatggaagtactggcacctgtgcatgaagatacacaatgatgttccttgaaacattatttataatagtgaaggtttgaatgtcataactatacatttatagtacagagtactatgtaactgttaaaaagaatgatctacgtgtgtatttattgccatagcaatatattgttacgtggaagggaaaaagttcagaataagtacatctgtacttatggtggggttatggcttgataaacccattgtaaattgaaaacatcctaagtcaaaaatacatttaatacacttaacctattcttagcctagactaccttaaatgtgtgtggaatacttacattagcctgcagtgggcaaaataatctaacttaaattctactttataataaagtactggatattatgtaatttacagaacactgtacattacactgaaattgtaatggtttcccactatcataaaggtgaaaagccctacatggaaccattataagtcaggactgtttgtatagtatgacccttttttttgggtaaaaattaccgaaaccctggctgggcgtggtgactcatgcctgtaatcaggcacataccacatgtatggccaattttgttcattttttttagagatagggtctcactgtgttgcccagggtggtcttgaacttctggactcaaatgatcctcctccctcggccttttaaagtgctagccttacaggtgtaagccaccatgttcagccccacagtttctttatccgttaacctgtagatagacacttgggttgccctcacccttgactactgttgaatagtacttctgtgaacgtgggtatacaaatgtttctttgagaccctgctttcaattctttcaggtatatacccagaggtggaattgctggatcatgtggtaattctatttttaatttaattttttttttgcgatgttgtcttgctgtgtttcccagcctgatcttggactcaagattctcctgcctcagaccccgagtagctgggactacaggtgcgcaccactgcacccagttttatttttaatttttggaggcatctccatactgttttctattgctgttacgccattttacatttccactagcagtgcataagggttttaatttctccacatccttgccaaccctttatttatttatatatttttggataatagtcatcttaatgagtagcaaatgctttctcattgtggttttgatttgcatttccctagcgattggttatgttgagcactttacatgtatttattggccattagtatatcttctttgtagaaatgcttgttcaagttctttgcccattttaaaattgggtttgctttttgttgagttgtaggagctctttatatattttgttttattttttatttgtttatttttttgaggcagagtctttctctgtcgctcaggctggagtgcagtggtgcgatcttggttcactgcagtctccgcctcctgggttcaattaattctccctgcctcagcttcccgagtagctgggattacaggtgcccaccaccattcctggctaattgttgtatttttagtagagatgggatttcaccatgttgatcaggctggtctcgaactgctgacctcaggtgatatgcccgccttggcctcccaaagtgctgggattacaggtgtgagccaccgtgcctggccactctttatatattttggatattctgtgttgcatatatgattcgaaaatttttttttctgctgggcacggtggctcatgcctgtaatcctagcattttgggaggctgaggtgggcggatcacttgaggtcaggagttaaagaccagcctggccaacatggtgaaaccccatctctaataaaaatacaaaaattagccaggcgtggtggtgcgtgcctgtaatcccagctatttgggaggctgaggctcgagaatcacttgaacccgagagttggaggttgcagggagccaagattgcgccactgcactccagcctgggcgacagagtgagactctaactcaaaaaaaaaaaaaaagaatttttttttttctattccatgggttgccttttcactctgttggtagtgttatttgatgcacaaaatattgtacactatacagtatgaactaacaaaaaacaatgagatgtgtgtagatagatattcatgatgtatattgaaatgacgagcaagttgaagatcaggcctccattttttactaagagaaaaatgcaccctttttttttttttagacaggatcttgctctgttgcccagggtggagtgcagtggtgcaatcacgactcactgcagcctcgacttcccaggctcaagtgatcctcccacatcaacctcttgagtagctgggactacaggcatgggccaccatgctggctaacttgtattttttgtacagatgaggtttcactgtgttgcaaaggctagtctcgaactcctgggctcaagtgatctgcccaccttggtctcccaaagctctaggattccaggcatccgccactgtgcccagcctgcacctctttttgattacagagttaggtatatataaactgagattgaaaaataagagaaaatatactcagggctgggctcagtggctcaaacctgtaattccagtgctctgggaagctgaggtgggagtattgcttgagctcaggagtttgagaccagcctggggaacacagtgagaccctatctctacaaagaaaaaaaaagaaaaaaaaaatcaccgaggtgtggtggtacccatctgtagtcccagctacttaggaagctgagacaggaggatcactggagcccgggaggttgaggctgcagtaagccatgatcatgccactgtactccagcctgggctggacaaagtgagaccctgtcttaaaaaaaaaaaaaaaaaagtactcagctgttactaatggttactgctgggggatgagattgaattggaaggagagaggagaggtacggggggcaggaaagggagacaataatgagggactttcagttttactttacataattttcttttaagtattggaatttaggtgatttttcctttggggttttctgtattttccaatcacaataaataaaataagttataaatatttgttgcatgaatgaaatgtataaacccatttatgtatgtatttttttaaaattagtatattattaagtctatacaatattagtatattgttatgtatgtataagctttttaacatgaagtttgcagaatatagtacttcttccaaactctatgacatggggggaactgaagtatggggatatcttgtaccagtgtaagaattcaagaagagaccgtgtgtggtggctcatgcctataatcccagcactttgggatgccaaagcaggatgatctcttggagctaggcgttcaagaccagcctgggcaacatatcaagaccccatctctaaaaaaaaaaaaaaaaattaactgggtgtggtagtgcgggcctatagtcctagctattccagaagctgaggtgggaggattgcttgagcccaggagtttgaggctgtagtgacctataccagtgattataccagtgcactctagcccaggcaacagagtgagacctggtctcaaaaaaaaaaaaaaaaatcaagaagagcaatctggatatgagcatttgggatttttagcaaactgctgagattttgtctatagcttgaacctttcttttagctaacttgatgatactgatgataagcaaggactgtctttttaaaaatgtttacttcattattttcctgacagaaatgacatcagatgtaccatcactgggtccagccattgcctctggaaactctggacctggaattcaaggtggaggagccattgtccagagggctattaagcggcgaccagggtgagtttgagtgtagtgtgttatgaatatctctcctataaaccaactttagttgctgaatttatttagttgctgaactcacttcgctattcctgaccatctcacttcaacttgattacttactacactactgtcatataagtctccttagtccctgtatttttgtttatgaagaatttgtttttatccaagtttcccgtaagcagttctttttttaaaccaaaatttccgtaagataaaggactgtagctaagcccagagattttactatgcctgagaaaactgtttgctgctttcattaagctttgtttctgttttcccaaaatcattttggtaggctgcttttctgaatttagagaatgctgagctctagaatagctgtcttctaagttattgatatgttgcttggtttggaatgcagagtccattcagctccaaaagtatttattaaattcctaattagtgttatggcattgtgctgattccaagtaggatacaaagatgaataagacacagtccttgtttctaagttggttgtgttctgatagaaataattattatacacatgaatatatgatagaatatgcctagttttgttaggaacaaatttgatactatgtttttctgtgtatggaaatatgcatttgttggtaaagactgagaaaagcttcagaaaggaggttgccttagaggggcctggaagaatgggcactattttatttactttttggtattaaattttcctttttccttctttttctttttaaaaattgtgcagctaattataaccagtctttaagttttgtcccaccaatagtaatggaagagtgatgcttgggttcagtggtaacatgagtaacatattaagacttgttatatgttcagtagctttacagattttaaccatttgctgaagcataagctgaataagtaactttctaagattgtaaagctagtaagtgtcagatataggatatgaaccttaggggtttagctttgtagcttactctttaaacactgtgttatgtttatgtacagtaacaaacaaaagtattataaatatcaaaattagggcatcacttgagaaagtcatagtatatttaaaatggaatgctatgtagttataagcgacaaatatgtttcagtgtagaaagatgttcacaatctattaagaaaggttacagtattatagtatttcactgtcaaaagatatgtataacatgtacataggaaaaaactgaaagaatatataccacatttctgggtaatagtattatgggtgacttacggtttcttttgtttttgatttttcagatttttgaaatgaacatgtatgattggtaatcagaaaaatatattaaaggaagtctttaaaaattttctttttggtttttttagagacagggtcttgtaccctggctggagtgcagaggcacaatcatggcccactgcagcctcaaactcctgctcaagcagtcctcctgccttggcctcccaaagtactgggattacaggcgtgagccacttcacctgtcctaaaagaagtcttttaatatttcttttatttttatttacttatttattttcgaggcagagtcttgctcttttgccaggctggagtgcagtggtgtgatcttggctcactgcaatctccacctctctggttcaagggattctcctgcctcagcctcccaagcagctgggactacaggcgtgcgccaccacgcccagctaatttttgtatttttagtagagatgggatttcaccacgttggccaggctggtctcgaactcctgacctcaggtgatatgcccaccttggcctcccaaagtgctgggattacaggcatgagccaccatgcccggcctaatatttcttttatttatttattttattttttatttttttgagatggagtctcgctctgtcgcccaggctggagtgcagtagtgtgatctcagctcactgtaacctccacctcccaggttcacgccattctcctgtctcagcctcccgagtagctgggactacaggcgcccgccatgatgcccgactaatttttttgtattttcagtagagacggggtttcaccgtgttagccaggatggtctcgatctcctgacctcgtgatccacccgccttggcctcccgaagtgcgggattacaggcacgagccactgcacccggcccatatttcttttaaagaaagattggaaaatacagaaagttagaaagaacaataaaaaggccaaaatctactaccatgttttttagtgcatgtccttcagtctttatatgtaaattgtttttaatagttatgtaattatatagttttacatggcctagtcttttcaccttatataaataataagcaatacacacgcacacacacattttggcaccttatataaataataagcaatacacacacacacacatttcggagacagagtcttgctctgttgcccaggctggagtgcagtggcatgatcatggctcattgtagcctcaacttcttgggcccaggaagcaatcctcctacttcagttctccgagtagctgggaccacaggcacatggcaccatacctggctatttttttttttttttttaaagacatggtctcactacgttgaccaggctggtctaaaactcctaggctcaagcagccctcccatctcgacgtcctaaagtgttgggattacagacatgacctactgtacctggccctttaaaaaaatattgttacatattctatataaacataatttttatttatttttttttgagacggagtctcgctttgttgtccaggctggagtgcggtgatgcgatcttggctcactgcaagctccgcctcctgggttcatgctattctcctgcctcagcctcccgagtagctgggactacaggcgtccaccaccacgtctggctaattttttttttttttgtatttttagtagagacggggttttaccatattagccaggatggtctccatctcctgacttcgtgatccgcctgccttggcttctcaaagtgctgggattacaggcatgagccactgcgcacagccataaacataatttttaatggttgcgtgaaaggatgtacttaacttcctattttgggacatctaaattgttttgaagattttgctgttacatatgatgctaaaaagaacttctttgtacctaaacttttttttcctatttcatattatttctttagattcttagaaatagagttattgggctgagcacggaggctcatacctgtagtgccagcactttgggaggctgaggtaggaggattacttgagcccaggaattcaagaccagcctggggaaaatggcgagacttttttttctttgacttagcaattatctttcttttccttccttccttcatttttttcctttgacttagcaattacctttccctccctccttccctctctttccccttcccttttttttttttttttttttgagatgtagtttcgctcttgttgcctaggctggagtgcagtggcgcaattttggctcactgcaacctctgcctcccgggttcaggcaattctcatgcctcagcctcccgagtagctgggattacaggtgcccgccaccacacccagctaatttttgtatttttagtagagacgaggtttcaccatgttgactgggctggtcttgaactcctgacctcaagtgatccgcctgcctcagcttcccaaagtgctgggattgcagatgtgagccacagtggctggccccttttcttttttgagacagggtcttgccatgtcactgaggttggagtgcagtggcccaatctcagctcactgcagccttgacctcccaggctcaaggcctgcagcccctcccgcccccccaacccaagtagctaggactacacatgcgccaccatgcctggttagtttttgtatgttttgtagagacgggatttcaccgtgttgcccaggctggtcttaaactcctgagttcaagtagtctgctcgccttggcctcccaaagtgcgtggactacaggtgtgagcaaccatgcctggctgagattttttaaaataaaaaaatttagttgagtgcagtggtgggctcctatagttccagctaattgggaggccaagatgggaggatcccttgagcccaggagctcaaggtggcagtgagctatgatcatgccactgtactccagcctgagtaacagagtgagagcttgtctcttaaaaagaaagaaaggaagagatagagagaaagaaagaatttgagttactgggtagatagataggattttacaggtgaccagattaggggattcaggaaggaggaagaggagcaaacactttcaggattgatgctgtatgtgtacttcaaatgcgacccatctagaggcccataatatcaaggtatcccaatagtagaagtaaaaagagtgatcactaggttaaggtggtaacatgagcaatattttagttcaatagtgtacagagattataaggggattggtctattttattgtttataatctttcctaatctcctttaaagaaattcacttcttctttccctgaatgtctgtagcatgttgattgtaccccttatgtgacactttcctattctcacttgttttatatttgtatttctctaggtgaagagccccttgagggcaaggttcttgtttttacctcacctagcacagtgtcttgaatgaagtatatattacatgtttattagatcaatgaaggaaagaaacattatctaacaatcttcgtaggtattaagtcactcctttatgtaagatcactgctttgaaagatgtttcagaaatttggtaacacggcttagagcagactctagaaatgaaacatggacctgaattatttacgttaattttttcttattttttctgagtggattcctgctccctttacagaggttgtagtctgattgaaaactctggcaaagattgactgctactctaggaaagtgttaaggtagcagaaggtacttttgtttctattgcccagttttgtactttttttttttgagatggagtcttgcagttgtcgcccaggcttgagtgcaatggtgcgatcttggctcactgaaacctccacctcccgggttccagcaattctcctgcctcagcctcctgagtagctgagattacaggcacccgccaccatgcccagctaatttttgtatttttagtagagatggggtttcagcatgttggccaggctgatctcgaactcctgacctcaggtgatccacccacctcagccttccaaagtgctgggattacaggcgtgagccaccactcctggccccagttttgtacttctttgcctagtttgggactatgaacaagaggaaatgtagctttgtttgacttctgccacttcctctttccattcttccatttgggtgggtgttccggtagcttgtgttgagaaattttaacttcttaatgttttgtattatcagcaggcttaaagtatttattgttggctttcctcaggctggattttgatgatgatggagaagggaacagtaaatttttgaggtaagagactgaaaaactttccttagatgtctgatattaaaaattagtttatgatctttatacttctgacttgtaaatttttgtccttaggtctaaggagagtacttcatcctaaaactataaatattcatatatctcagaaaatttttaagcattccgttaatatctctagagaaaggacctcagtgaggagaggacggcatttacaaaccctctgtatcagttctctgctacttcatagcctaaaaagaacaacagttcgttatttctcaattctgtggattgactgcatgtttattctgcttatctcacctagactcactcataagactgcattctcagctggtcagctgagaactggactcagctgggatggctgggtatttctgtctatgtgtttttttatcctcaaggaggccagactgaattttttcatgtggtgatggctacaatctacagcacaaatcccagtgtgcaagtgcttatcaagcctctgcttatatgacatttgcttatgtcccattggccaaagcaagtcatatgttccaggtgtgagtgtgtgagggggttacacaaggaagtacatactgagaggtgtaattcattggttgaggtgtcattaatctgtgactctgtcataccctctgacacctgttgacacctcttataggtagcaggaattggaatttgtattttttgtttttgttttttttttttttgagacggagtcttgctctgtcgccaggagtgcagtggtgcaatctcggctcactgcaacctccgcctcctgggttctagcgattctcctgcctcagcctcccaagtagccgggactacaggtgcgtgccaccatgcccagctaatttttgtatttttatttttttattttttattaattttcttttttattgatcattcttgggtgtttctcgcagagggggatttggcagggtcataggacaatagtggagggaaggtcagcagataaacaagtgaacaaaggtctctggttttcctaggcagaggaccctgcggccttccacagtgtttgtgtccctgggtacttgagattagggagtggtgatgactcttaatgcgcatgctgccttcaagcatctgtttaacaaagcacatcttgcaccgcccttaatccatttaaccctgagtggacacagcacatgtttcagagagcactgggttgggggtaaggtcatagatcaacagcatcccaaggcagaagaatttttcttagtacagaacaaaatagagtctcctatgtctacttctttctacacagacacagcaacaatctgatttctctatcttttccccacatttcccccttttctattcgacaaaaccgccatcgtcatcatggcccgttctcaatgagctgttgggtacacctcccagacggggtggcggccgggcagaggggctcctcacttcccagaaggggtggccgggcagaggcgccccccacctcccggacggggcggcggctgggcggaggcgcccccaccaccctcccggatggggcggctggccgggcgggggctggcccccgcctctctcctggacggggtggctggccaggcgggggctgccccccacctcccggacggggcggctgccgggcggagatgctcctcacttcccggacggggcggctgcggggcggaggggctcctcacttctcagacggggcggctgccgggcggaggggctcctcacttctcagacggggtggctgccgggcagaggggctcctcaattctcagacggggcggctgccgggcggaggggctcctcacctcccagacggggtcgtggccgggcagaggcgctcctcacctcccagacggggtggcggggcagaggcgctccccacatctcagaggatgggctgcggggcagagaccctcctcacttcctagacgggatggcggccgggaagaggcgctcctcagttcccagactgggcagccgggcagaggggctcctcacatcccagacgatgggcggccaggcagagatgctcctcacttcccagacggggtggcggccaggcagaggctgcaatcctggcactttgggaagccaaggcaggcggctgggaggtggaggttgtagcgagccgagatcacgccactgcactccagcctgggcaacattgagcactgagtgaacgagactcagtctgcaatcccggcacctcgggaggccgaggctggcggatcactcacggttaggagctggagaccagcccggccaacccagcgaaaccccgtctccaccaaaaaaatacgaaaaccagtcaggcgtggcggcgcgcgactgcaatcgcaggcactcggcaggctgaggcaggagaatcaggcagggaggttgcagtgagcggagatggcagcagtacagtccagcttcggctcggcatcagagggagaccgtggaaagagagggagagggagaccgtggggagagggagaccgtggggagagggagatggagagggagagggctaatttttgtatttttagtagaaacagggtttcaccatgttgggcaggatggtctcgatctcttgacctcgtgatccgccctcctcggcctcccaaagtgctgggattacaggtgtgaggaatttgtatttttgagttgttaatattctggagcttttaaaatggactatttatttgtttgtttttttgagacagagtcttcctctgttgcccaggctggagtgcagtgctgcagtcttggctcactacaacttctgccttccaggttcaagcgattctagtgcctcagcctcctgagtagctgggactaccacacctggctaatttttgtatttttagtagagacggggtttcaccatgttagccagactggtcttgaactcttggccttaagtggtccacctgcctcagcttcccaaagggctggggttataggcataagccaccatgtccagcctattttcttcttatttttttgagacagggtcttactctgtcacccagactggagtgcagtggcacagtctcggctcactacagcctcgaactccagggctcaagcgatcctcccacctcagtctcccaagtagctgggtctacaggtgtgagccataatacctggctaattttaaaatgatgttgcccaggctggtcttaaactcctgtgctcaagcaatcctcccaccttggccttccaaagtgttgggattacaggcatgagccactgtacccggcctgaaaatggaccttttaatatattgatgaaggagttctttcagaaaagggggatattcttgctgaagaccaattgcttgtcttcttttcaagtaagaaaaacagtaagactcaaaaggaagagaactttgaccgcaatctgctttttttctttccagagttgaaaatattacccaggtagtctgtacgttgctgagtaacagacaatttgataaaggagcccaatgaaaaaaaaatgatttgattgtgtgggtgcccagatttaatatcatttatttattttctttctttctttttttttgagactgattttcactcttgttgcccaggctggagtgcaatggtatgatctcggctcaccgcaacctctgcctcccaggttcaagcgattctcctgcctcagcctcccgagtagctgggattacaggcatgcactaccatgcccggctaattttgtatttttagtagagatggggtttctccatgttggtcaggctggtcttgaactgccgacctcaggtgatccgcccacctcggcctcccaaagtgctgggattataggcatgagccaccacacccggcccatttctttttcttatttgtttgttttgttaactaagttttttctttaattgggaaagtaatataagtgtattttattacagaaatttcaggctgggcctggtggcttacacctgtaatcccagcactttaggaggctgaggtgggtggatcgcttaagctctggaattcaggaccagtctgggcaacatggcaaaactccatctgtacaaaaaatgttacaaaaattagctggaagtgctggtgtgtgcctgtagtctcagctactcgggaagctgaggtgggagggtggtttgagtcctggaagcagagattgcagtgagccgaggttgcgccactgctctccaacctgggcgaccttgcctcaaaaaagaaaaacaacaaaatttcaaacagtgcagagttatatatagtgaaagcacatcttcgttttactttggaccttcagaactcctttttttttttttgagaggagtctcgctcttgttgcccacgttggagtgcagtggttcgatctctgctcattgcgtcctccgcctcctgagttcaagctattctcctgcctcagcctcctgagtagctgggattacaggcgcctgccaccatgcccggctaatttttgtacttttagtagcgacaaggtttcgccatgttggccaggctggtctcaaactcctgatccactcggctcggcctcccaaagtgctgggattacaagtgtgggccactgcccccagcctggaccttcaaaactctttagacaactacagtttccagtttgttgagtatccttccaaaaatagtatatatagaattgtatataaatgtgtatgtgtgagcatacacacacttatctcctcagttttttttacacaaaggatgtccatattgtaaattgcttgccattttttagttttatattgcttcatacagttaatagcatctatcttctttttttatagtaacatttaaagttaaggctcatatttctggctactcactagatgaactttgccaaatactcttgaaaacaacaaccgtgacttggccatcataaagaaatagttgcaagtggaagtataattctctaagaggtctcttgagacttaatgagtctcagtaaatgtgaagaagggaagagatttcaatttctggagaagatagactttttcaaacagctttattgagaattcctcctattgagaatcctgaattataatgatacatgctattagtggaacttcactgtgtgtatgaaagatatgagggtaaccactagtctttttttatacccgtgaattagctctaaccctgagtcattgcttccataaaatccagtagtcacaactacatgcagatccaaagagaggttcgtttgtccttttcctaaccataaaaaaagactatcgtagtttatcttaccaagtcgggttgttgtgcctgagaaaagcactgccgaattccctttcccccttctttttttttttttttttttttgagacggagtctcgctctgttgccacaaatgcagtggtgtgatctcagctcactgcaacctccgcctcccaggttcaagtggttctgctgcctcagcctccgaagtagctgggactataagcacgtgccaccacacccagctaatttttgtatttttagtagagacggggtttcaccatgttggccagagtggtctggatctcttgacttcgtgatccgcccagtgttggcctcccaaagtgctgggattacaggcgtgagccactgcgcccagcctcccccttctttttctgggtatatatatacaaaataatcgaaggcagaatcttgaagagatatttgcacactcatgtttattggcccattttgcgcaatagataagaggtcgaagtaaccgaaatgtccactgacagatgaatggttacagaaaatgtagtatgtacatacaagggaatattattcagccttaaaaagaaagaacctgtcatatgctgcaagatggatgaatcttaaggacattatactgaaagaataagccaataacaaaaagacaattactgtatgattccacttacatgaggtatctacaagtagtcaaattcatagacacagaaagtaaaatggtggttgctaggggttggggtgaaggagaaatgagaaaatggtgtttgatgagtatagagtttcagttttgcaagatgaaaaagttctagatatctgttgcacaacaatgtgaatatggttagcactactcaactgtacacttaaaaatggtatacagtaaattttatgtgttttttaccagaattaaaaaaaaacccaaaactaaccccttactttagaattgtgctgacaggccagtcagctgtgttgtcattagatcatcatctttttttggtgtgtctggtaagggtaatggaaataccagaaacctgacaaataatagttgtgggtcttttaagttctatggggtgctgctgttatttctatcactttgtgatgcttttccattggctttttttctattgaatattttcacccctttctagtttacttttcagagtgaaatagatataacaagtgtaatgctttgaaacaatcctttttctctccttcaggtgtgatgatgatcagatgtctaacgataaggagcggtttgccaggtaatattgtagtaggtaatatattgtaatatataatatgatccatgttgtagaaccagacagtcctagcatattgacttaattttttctggatgagacggaatttctctgtttaatatctttcctatttggaagtatgtgaaacttagtattataactatcatttatgttcaggtgacatggcttcaaactggcggtatattttatacagtgtttttctgtgtatgtgataactaaagcaatgtgcttgcaaggtttccataggagcacaaattatggattttgtgcttgcatttattattaaatggatctacaaaaataggaatacagataatggttctgtaattaatttatttattttgagacagagtcttgctctgttgcccaggctggagtgcaatggcgccatctcggctcactgcaaccttcacctcctgggttcaagcgattctcctgcctcagcctcctgagtagctgggattataggcccctgccaccacgcccagctaatttttgtatttttagtagagatggggtttcaccatgttggtcagggtgatcttgaactcctgaccttgtgatccgcccgcctcggcctcccaaagtgctgggattataggtgtgagccaccgcacccggcctattttatttttttgagacagagtctcactccatcacccatgctgtagtacagtggtgtaatctcggctcactgtaacctctgcctcctgggttcaagctgttcttccacctcagcctccctagtagctgggaatatgggcatttgccaccatgcctagctaatttttgtaataattttttttagcagagatggggtttcaccatgttggccaggcttgtctcgaactcctcacctcaagcgattcacccacctcagcctcccaaagtgctgggattacaggtgtgagccattgtgcctggcctattattttattttaagatatgtatattttttagagacattgttttcattgtgtttcccaggctggagtacagtggcatgatcatagctcactgcagcctcaaactctggggtttcagtgatcctcctacctcagcttcccaaatattgggattatatgcatagccaccatgcctggttggtcctgtttttttaaaaatgacagtaagaggcggggagtggtggcatatgcctgtaattccagcactttgggaggcagatgcaggtggatcacttgaggtcaggagttcaaaaccagcctggccaacatggtgaaaccccatctctactaaaaatataaaaattagccgggcatcatggtgggcactcataatcccagctactctagaggctgaggcatgagaattgcatgagcccgggaggtggaggttgcagtgagcagagatggcaccattgcactccagcctgggtgacagcaagattttgtgtcagaaaaaaaaaaaaaagacagtaaggaaacagtttttgtgacaagtagagttttgattgaaaaaaacttaaatttgtttaaattacctatcaagatgatgaaatatacttttttttattaaattcttaaatgtcagttttctttttagaaagtttttattaaatattaggcaataaattatttcttttttgaaaattaagtttgtagctacctcagaaagatgaataattcgttatttcaaaatccagtgattaactgagcacttagcacttagtatttgttcgttgctgatgctcctggtctcgggaacatactttaagaaccgttgatgtagagagattagaaatatcaggggaagtagttaaaaactattctggagtggtgagatgcaatctcaggctttgaattagagggtattacataaaatgcattgtagggatatttctctggtagcagttatagaattgattaaagggatggactgttagactgtagggaggtagataggaagctgttgaaataataagacagctataaaatcatgagggcctgggttacagtggcagtggtaacaggaaaggagtgaagttaagaggtttttgaagaataatttgtttatcgaaactaattgaaataaatatttgtaaagtctttaggatgtgaaccatctctaaaatgagaagttaatcatagatatttggaggatagtttttcaagcttcattgaaaagtcaggccatcagttattattggcagtatcttgatgaaatttcaaaaagccatgaaaacatcgcatgaatgatt

SEQ ID NO: 960 - DNA, 26067 bp, Homo sapiens
  source 1..26067: mol_type = other DNA
cgagcccgctttccagggaccctacctgagggcccacaggtgaagccacttagtgcctgatctgtgtcggggttgggggagccatgggctcaggggtgagggagagtggaacggagccaggaagggagggggtgccgtggagggaagagaatcgaggctgatgctggggtgcaggggtggcatggggtgtgtggtgtgcccagcagtgtgagtctctggagaggtgggcgctggggagaaggagagggaaggagagacgggtatggatggaaaggcagaggaagccaggctaaaccagcgtgtcccaatgaggggccctgggctgagtggaggaaatgggtgcggtggaggtgggtttggctgggcacagcgggcacgtgtgggtaagcgggtggggccggttgtgcgggtggcctatctggggcaagcagccgaggccgactgtgtccggcgtgtggttgagcacgggcaggtgtctggcggtgaccctgcacgtctggtgtttacctggccctgggtctgacgtgggccgcgcctggctgctggcgggacagtgtgttatctgcctgcggacgcttccggccacttggcctgggcctctgcccttagcgctgtgttttcccggccaagccccccatcccccctatctagtgctaggactttctggctccagaggtcaccgcggccgggcggaggctgccaaagcaaaccagccccgtgacttgtaggaagccagcgggggaggggccggggcaggatgagcagggcaggcgggagaggctggggctggggttggggcccaggaattgggcagggaattaggcagaggtgcagcaagtggcgggcacagccaggacctggggctggaggacgcagaaagggcggggggaagggttcgctgggtgagggtggagtgggcttagggcagctggggccctccatctgatctcttctggtcagacccccacccttcagcctgcactttctccctaaacccccagcctccggccaggcctgtccctgttcccacatccccgcagacaggcacacctgggtccccctggaggtccaaggcaagccccgtagctgggcccgcctggtccagcccccacaagcccggccccatcagccaggtggcctccagtgctgccaatcgaatggtccggcccctccccgccccttcacccgcccctcgcccagccccctcctcctcaggtgaggcagcctggcctagcaggccccacgccaccgcctctgcctccaggccgcccgctgctgcggggccaccatgctcctgcccaggcctggagactgacccgaccccggcactacctcgaggctccgcccccacctgctggaccccagggtaaggacaagggcccccagactcacagttccagccctgaggacaggggttccctcatccccccacccagcctaatgcccacctcctaatagaggggttcctggggacctgaagagggggcactatgacgtccccccaagcacctaggtgttctgtcctgctcttccttcagactcagccgttggaccccagtcctttcctccccagacccaggagttccagccctcaggcccctcctccctcatactagggagtcctggcccccaaattcctcctttcccaagacttatgatttcaggtcctcagctgtctcctccctcaaaccgggatcctcagtcccctgctccaccaggctcaggcatgggggtccccatccctgcaaatccaggcgtccccccgctgctggtcagacactgaccccatccttgaacccagcccaatctgcgtccgtgatcacggcgtgctctggccaaggcccagtccctacagcctgcctggatggacgcctgggactgggggcgccaggactgggctgggctgggctcccccaggccctgcctccccgtccatctcctcacaggtcccaccctggcccaggaggtcagccagggaatcattaacaagaggcagtgacatggcgcagaaggagggtgagtccccttccctgagccccagctttggctctgcctggcgccccgccctctgtgctcttttctctaccctctactcttcggagccccctctctctgggcacccctcccagatgcatccccacccctgttagtcctcctccacctgattaactattaaccacattttctgtgcagctgtgccaccaccagcctcccttctaccctatgtgaccttcctggcgtgctgcctcagtttcccctcatcccccagtgatttctcagctaactctggacttgtcctctgctggggctgaggcggggaagctgtagctgtcatggttaaggacacagatttggagtgaaacacacaggcttgcatttgaatttgctcttgccatcttttttgctgtgtgatctggtgcaagtgacattattcttagggctttggtctccctctgggtcaagcatggataccagtcctccctctgtgaggttgctgagtgcatgacacacaccaggcactggtctggggctctgcatataagacgcatgccatcaagcagagctgtcatgacagaggttggcaaactcggagtcccagagacccaggacccccaccgatcccagacattcctccacctcctggctctgtgggcaaaagagcagagggaggactttggactgggcctggatggatggagaggggagagacggcagagaaaccaccataaggatgagagagagagactgcgtcatggagttgctggcccttgggagtctctgggcagcccccagctagcctggcttcctttctacctctcacacatgggacccagctggaggggcgcatggaggggcgtcctgttctttctgccttcccctagctggggctgactccctctcttcttccgcaaccaggatagccgggctcagtcctgggcagtagcactttctagctgtgtggccctgggcagacggcgtgttctccctgggcctccattctctcatctgtgaaatggagagggtgacagtgcatgtccaacagcgtggggcgaggcctgaaatgccaggatgggcaggaagcactgagcgtgttggctgaaatgattagttcagatctctggcctcctcgggtctcggcacagctggcaattcagaccccaaaccaatcagctgcagtccagagggaacccaggctcccagttactcaggagaaggcattgcaccctagccgagcaggtggatgacagaatccagctccttggggacaatctctttcctggagctgccggaaggacagccccagggcttgggcccatgggtgaatgagccagggaagaaaagcagaaaatgcccgaatggacagagatggcctgggtacaaagagaaacagacacaaagtgggctctggtgcctccctggcagctccgggctggtcttggaggggagtcctgctgtcagggctaggggtgtggaggtcgaacctggacacagatgctgaagggttccgattctgcacttacttgccgggtgacccgggtttggtggctgccggactttgggcctccttttctcatctgtaaactgggggtgatggcaatggcgccttcctcgtgaacagctgcaaggatttaagtaaggatgctgtgcaggactggacggggttagggtagggcggtgcgtccgtgtgtgattcagagagccgttgtggctgcagcggctgctgttgttggtgtcactgttattgctgctggcttcttggtgctgcctggaaacttggaattggaggaggtgatactggagttgcaattccaaggatgccaggcagagggaagagcaaggctcttgctcttctctgggaagctgggaggtgacacagcactggtgtgcacgtagccaattgtggtatttctggaggtgaagctggaagttgagctgggtgggagaagaggtgtgcaagctggaccaggcaggggtgggactgttttggggaagagctggccaattccttgcagtaccaggtctctccacaaggtggcgccagtggttagtccctgcttctcttgtctaacttgtattttacaagttctactgtttgggttgctttttggaagctctctctggtacctgatagtgacccacatggttgtctgagaattgggggaaacatactcccaaatctctgaaagccatgcttataccctagtggggctggaaatgccaggctgagggacttaagctgtctggggggtactagggagtcacagagggttctataggtaaagaggggacaggttggatttggtgtctcagtaggttccccaagcctccgtgtggagggtgcgctagaagggagactgagcccagcggttggatggggccggagcaaggtgcagatggagagaaagaaggaaacgggggaaggagagtcactcaggaggattggcaggctgtcgggggaggggaatgttatgcagatggggatggtcctaggagtgagggcctctgagacaggaccgggaggaagaatatacttggggagacattggggagacattctgggacctggtaggggcaaagggactaggaggtcccagggaaaggtatttaaaaggtatttaaaggactgcaggagccctgacctgggacctggaagagggtctagggctggggacagaggggaaactgagtccacagaggtgggtgagacagacttaggggcaaggaggagcagggggaggctgcggccagccctacaaactctggattttacggagtaggtagagggtgggtgaagacagcagcctcagaggcgggaaggaaaatcaggtgcgcctggtgtcccagaagtccaaagaggagagcatttatacaggaagctgcagtcatgtaagatgaggcccgagacacggagccaccagttgagtggattttcagagccagagagccaaaggtgttacgcgtgggggtctttgcagccaaatggtggaggcggaagaactgacctatgagaagacccaaggcatccagaggggcctggagaagcaggggcagagagtctcagggagatgtaggggtgggggaggtctggcttaccaagggaaatagccctgctgctgggatcaaagaattgatgttgacgtgccgcctgtcccagtagagacacgcagggaggatgaggatgcgtcccacaccctgggccagatgaggatgctgcctgtcccagtagagacacgcagggaggatgaggatgcgtcccacaccgtgggccagatgaggatgctgcctgtcccagtagagacatgcagggaggatgcctctcatactgggggaaccccaggatgcagatgcttcctgtcccactggaggcgctgaagtcctctgaaccacacagcatggaaggaggttcttcctctcaccctaggagacacatacatagtggcattgcttcctgtcccaccagatgtgccaaggcctctaggctgcattctgcatggcctagagccctggcaggcacagctgaaaacaaagcaagcaagaccagcccagtggctgtcgggagccaagacctcctgctggaacctggagagtggtcctgggcagagttggggggcaggcctgagaacccctcgcaggacaggcaggggtcagccggcagtagttgggctggtctggcccactggggcctcttttggggaagagagtgtttcctcatgccttgatgggagccactgagctttcaatttttttttttttttaatacagagtctcgctctgttgcccaggctagagtacagtggcgcaatcttgattcactgcaacctccacctcccgggttcaagcgattctcctgcctcagcttcccgagtagctgggactataggcgcccgccaccacacccagctaatttttgtatttttagtagaggcggggtttcaccatgttggccaggctggtcttgagctcctgacctcaagtgatccacctgcctcagcctcccaaaggaccgggattacaggcatgagccaccatgcccagcctgagctctcaaattcttaagacacccagataatggccacaccaggaaggtcctagaccactccctgctctgttccaggtgctggcctggtgccgggttcaccagccacatcaccatgggtgcagatgggcgagctgggagctcctgccaccttggggtgctttgcggctgccaagggcagttgaacccaagccaggcccagctgaaggctttcagcagcctttactctttggccttcttataatccctagtgaaggggttggcttttatttatttatgtatttatttatttatttattttttgagacagagtctcgctctgtcgcccaagctgaagtgcagtggcgcgatctcggctcactgcaagctctgcctcccgggttcaagccattctcctgcctcagcctcccgagtagctgggattacaggtgcctgccactgcgcccggctaattttttgtattcttagtagagacggggtttcaccgtgttagccaggatggtctcgatctcctgacctcgtgatctgcccacctcggcctcccaaagtgctgggattacaggcgtgagccaccgagcccggctaggagttggcttttaatctccaggacctctttgccctgggaataaaatcccttttcctgtgccaccaggcctccccagctggccccagccttggttcccactaccttccccaagctctggccatctggccatctcgatggcctctccagcctctgacataagagagcctgcttattcttgcctcaaggcctttgcctgtgctgttccctctgcccacagtgcccttccttgtggtctgtgtgtggctggcacctcacctttcagagcttagctcagaagtctcctctaggggaggccctgtgatccctgatcccctgcagaagcccacctgctgccccagcctgcacggttttcttcacagcctctgccacaatctggaaattattgggttcatttacttgtttccttgttaatgtctcccactccccacctacacgcatgagaacgtgaacccctgagagtcgtaaccttatctgtcttctttgggttatgttcccggaacctagaaaggtgccaggcacacagcggatgttcagtaggatggtaaacaaataaagcttctttaggctgatgaaaaaactgagggtcaggcgcggtggctcacgcctgcaattccaacactttgtttgggaggctgagacaagcagataacttgagtctgggagttcacgaccagcctggtcaacatggcaaaccccgtcaatacaaaaaatacaaaaattagccatgtgtggtggtgtgcgcctataatcccagctactcgggaggctcagaattacctgagcctgagcgcttgagactgcagtgtgccatgatcgcgccgctgcactccagcctgggcagcacagtgaaaccctgtctcaaaaaaaaaaaaaagaaaaagaaagagagagagagagaaaaagaaagaaagaaagaaagaaagaaagaaagaaagaaagaaagaaagaaagaaaaggaaggaaggaaggaaaagaaaaaaactgaggctgaggctcagagaggggaggggagttgctcaggcccacacatctctgatgatttataaagcatttatagagaacttgctatgtgccaggcacttccgcacagtgagagccaggatggcttcgtggctgtacacaggggacctggcatcaaacctgcccagggttctggacgctgctctgcctcttccaggctgtcactgtgggcacgtgaccccacttctctgagctatctcaaaaacaggaatcatagttgtgggattgaaataaggactaaatgagctgatgtatttagaacggtgcttagcacctggaggcatcaatacaatttgagctattcttcttcttcttgaaaataactttaaattattatttttagaagtaggtgctcagtggatgcccatttaatagataagaaagttgaggctcaaagatatgatggcacctgccttaggttccagctaggaaggggtagggtcaatatttttaaatgaggctggccagacgcagtggctcactcctgtaatctcagcattttgggaggctgaggaaggaagatcgcttcagcccaggagtttgagaccagcctgggcaacatagcaagaccacgtcgctaaaaaaattaatacataaaataaaatgaggctggcagattttcaagtggaggggcaaatttgatcttgcaactgggtaccatgagagaggtctgatttagggggtatctaggggcaaagcatctagaacagcagaaacgactgaggcagcgaggaaatgccagcggcagggaagagagctaccaagagggcaaaggttgggggtcacagtcccaagaagagatggcccaaagcaaagacagaaatacaaaagcacagtgtcactggggaggagacattccctaagtgccaggaaagtgcagggcggaggtggagaccgtggcaggtggcccggccatgcccccctcccagctggaaccctgggggagctgggcacctggttgttcacacggcaggggaggaacagccctgtcaactgctggccccgggaaactgggcctggggaggacatgcttgggcataataagttagccctgggggcagggcagagctggcctcgggcccagaccctgccgcaatgaggacaggcctggctgtggccccagcatggtgtctgttgcaggtggccggactgtgccatgctgctccagacccaaggtggcagctctcactgcggggaccctgctacttctgacagccatcggggcggcatcctgggccattggtgagagcggttcctgtgcctctgacctcccctggcccctgcagcctccagcctgcctgccctcacccctcccttctctgcagtggctgttctcctcaggagtgaccaggagccgctgtacccaggtgagtggagcaggctgggaccctctgggggagccctggaggacacgtgtatctggcgggagctcaacaagcgtatttgttgaataaatgcacaaatgcatgcagaaatgctaatcataatagtgcatttgtattgagtgcctgctatgtaccaggcactattctaagcaccccacatgtctaacccagactttttcagacaccagtgtattactcatgagtgcctcataaaattaaattagtgagttggaaaaccatgttttttttttaagtatgaaatagattcgattacagactatcacagtacatctctcagtaagtaaaggttatgctaatttttgtttgtttttttttttttttgcatccatatacatgtaatcccactgcatccccacactctgagggtgggactgttattctccctgttttacagatggggaaactgaggctttgagcaatgcagcagtttgccccagactacagagctatgggctacatcaggatgtaaaaatgtgtttcttactgcgtggcatggtgaaaacatgttggggaggcatgatataaattcagtggacccttctaactctcctaggaggtagtttttttgtttgtttgttttaaaaaagaaaaaagtcttgctctgtcacccaggctagagtgcaatggtgcagtctcagctcaccgcaacctctgcctcccaggttcaagcgattctcctgcttcagcctcccaagtacctgggaatacaggcgtgtgccaccatgcccagttaattttttgtatttttagtagagatgagatttcaccatgttggccaggacggtctctatctcctgaccttgtgatccacccgcctcggcctcccaaagtgctgggattacaggcatgagccactgcgcctgtccctggtaattagctccattttacagatgtgcaaaatgaggaccagagaggacatgcagctggggaacgaggggccaggaacagctcttagacttatccactgtaagtgtgtctgcaggcatgtggaatgaatggccacacaaataaatagataaagaaactaactgtgggatgaatgaatgaatcttcccaaatgccaacttcaagctgccattccctgatgcaggacagcaggaaaaaaggggaagttgggtggtgggatgtatttttcatgtctgtgagcctcatctaattccataaaggattcagttcacactaaaatcagaaatgaaaatccagacaagaaaagccaacatcaacattaatcatcattaccagcacttagcatttgtatgcaccagccaaggccttgggaccttatgatatcaactcattaagtcttcccaacaacctgttgtttttcttttcttttttttttctttctttctttctttcttttttttttttttttttttgagatggggtcttgctctgtcgcccaggctggagtgcagtgacacgatcttagctcattgtaacctacatctcctgggctcaagcaatcctcccatctcagccttctgagtagctgggactataggctaatgccaccatgcctacacaaaattattttgtcaataacaaattattgttatttttatctttttgagccagagtctcgctgtgtcgcccaggcaggagtgctgtggcgcgatcttggctcactgcaatctccatctcccaggttcaagtgattctcctgcctcagcctcctgagtagctaggactacaggcacgtgccaccacacccagctaatttttgtatttttagtagaggcggggtttcaccatgttggccaggatggtctcaaactcctgacctcaggtgatccacccgtctcggcctcccaaagtgctgggactacaggcatgagccaccacacccaacctcattttttaaatttttagtagagatgggatcttgctacattgcccagtctgatcttgaactcctgagctcaaagcagtcctctcagatcagcctcccaaagtgcagggattacaggtgtgcaccaccacaacccattttcctatggggatgctgaggcacagaaaggctgagtgacttgccccaggtcatggagctagtcagtgtcagggctgggatttgaacccaggcagcctgcgtagtaactgtatatagtgtctacacttgattgcttgttaaaaaaaaaaaaaaagaacagctgaattcattgccatagtaaagactgacatatgccaggccctggcggcagcctttacccagcaggcctatgaagttagggctgttacatcccaacattttgcatttgggggaaattgagtcccagtgaagcaaactgacttgcccgaggctgaccacacatcagagacagagcgaagggatcacgcccctgtcaaaagcccctccgtgacaacacgtggcattgagataaaatcccaacccatcacaggctccaagcctcctagtgtggaggcccctctccacccccacctcacactggcttctagcaccctcagggcccagtcccttgctcaaatgacctgctcacacagaagtctctactcacccacttctttctagctcacacccagaggcagatttcagttctgcacagttccttctgagctgtggggcctcccaccagtccctactctctccaagactcaatttcctcatctgtgagatgggggtaagaagaatcagtgggaataagaggagataaaaatctgtgtagtacttgggcggggtgcggtggctcacccctgtaatcccagcactttgggaggccgaggcaggcagatcacctgaggtcaggagttcgagaccagcctggccaacgtggtgaaacctcatctgtactaaaaacacaaaaattggccaggcgtggtggcgggcgcctgtaatcccagctactcaggaggctgaggcaggagaactgtttgaacctgggaggcgcgggttgcaggttgcagtgaactgagatcacgccactgcactccagcctgggtgacagagcaagagtctgtctcaaaaaaaaaaaaaaaaaaaaaggctgtgcagtacttgcctcttagccagcacagtggacattggcttttgtatctcactcctgaaattctttcttgaaatttcttgagcaagatcttcctggacttccagactctatggcctctcaccctatggtgtgtccctgccaccccggtaaaaccctcctcactcattgtgaattatttactcctggcgaactccaggaaggcagggaccttttgtggtcagacggtgcctggcacatagtaggttctcaggaaatccttgagttatgagtgcacccaaagccaaaacactgggatgaactagagagtcatgggcctccagctggaaaggagcgaggccaccactcacacccggctctggccagcaccacgccgccaccctgcagaggtatttgggtttttcaacaactcagggaaatgatgaaacaaacaaacaaacaaaaacaaccccaagcttgtatccccacctcgctttttttttcctgggattttcacacttctaaatatatccaacaacttggcaggcacaccaggtgacccagaacatcctttttgtgttgcctgaaatgataggaacaagaataaagaatttaaaagtgagaaacagcagcagagagtgtgactttaaaaatagccagaggggacatttgatgttctctccccactcccatctcccccaacacacatctataaagtgattttcccccctaaaacctcacactttctggaaatcacatttccagagcagttaacagtcattttaaaataagaatccacccctcttcctgccccagctggtgtttcaaactccaagccttggctttcatggggtgatgaggaccccccagctagaggtgccaggcattccctgccccaaccccagagcaggagaccgtaattaaggcaggccaggccggtgcggtggctcacgcctgtaatcccagcactttgggaggcccaaatgggcagatcacttgaggtcaggagaccagcctggccaacatggcaaaaccccatctctactaaaaatacaaaaattagccgggcgtggtggctggtgcctgtaatcccagctatttgggaggctgaggcatgagaatcgcttgaactcaggaggcagaggttgcagtgagctgagatcgtgccactgcactctagcctgggagacagagcaagactccatctcaaaacaaacttaaaatagaataaaataaaataagaatccgcccccctccccgccccagttggtgtttcaaaccctgagacttggccttggaattcatggggtgatgaggaccccacagccagaggtgccaggcgttccctgccccaaccccagagcaggaggccatcattaaggcaggccagccaggtggcttttcagtgccagccgtagctgaatatattaggcagggagacaggcaagggtttgtatgagacccacagaaggaacagggaatatgctggtctgggttcaagtcccggttttgctggttagccgtgtgcctctgggcaagtttattcctctgaggcttagttttcccatctgtaagatgggcatagaagtggtcactactggctgggcacagtggctcacgcctgtaatcccagcacttggggaggccaaggcaggtggatcacctgaggccagaagtttgagaccagcctggccaacatggtgaaacgctgtttctactaagaacacaaaagttagccaggtgtagtagcatgtgcctgtaatcccagctactcgggaggctgaggcaggaggatcgcttgaacctgggaggcagaggttgcagtgagccgagatcatgccactgcactccagcctgagcaacagagcaagattatgtctcaaaaaaaaaaaaaaaaaccgaagtggtcactatctccgaggatggttgtgggattcagagagccacttggataggatgcatagcatggggccagcccactgacaccccccagtaaacgtagccagtgctattattactgtgctgttgtttaaccctccagaggggaagtctcttgagaggctgtccagggcaatgttaaaagcttggggtttgaagtcactcagacctgatttcgaatcctctctccctgcttctcgtgcatttggtgacgttggggaagccaccccacctctctgagcctcagcttccccgtctggaatttggggatgatcttcgtggctcctggggtgtgcgacgaggccttggttgatggtggggcagaggtagcctagccccaggaacacagtaggtcctcagctggggagagttctacttggaagtcttgcttctccttgtcccaacctgcggggctgtgggaagacccctcagctggtgtgtggcctcaccaggttccttctaagaggatgcaaaagcaagttttcatttgactcggtttcccagaatgtgctctcagagcccaggccaggcaggaggctcttgagaaaaggacaaaaagacatggtggctcacacctgccatcccagcactttgggaggccaaggtgggaggattgcttgaggccaggagtttgagatcagcctggacaatatagcaataccctgtctctacagaaaaaaataaatttaaaaggcgtttttagctcaggctttgctgggttctaacctggctattgtcactcagctttatcctaacataaaaaaataaacaaattagcagggtgtggtggtatgcccctgtggtcctagctacttgggaggttgaggcgggaggatcgtttgagcccaggaggttgaggctgcaatgagctatgatcgtgccactgcactccagcctgggtggtggagcgagaccctgtctcaaaaaagaaaaaaaaaagtggcagggagaaggaaaggaaaggacaaagaggttcacagctgatctctccctgaacctgctccttccgtccccatctctgtcagccccatcttttcaggctcaggccaaacccctcggttaccctcccagttcctccagtcacccatgaatcagatcttgcaggaaaccctgtcagctgcacctacagaacctctccaaaatctgaactcttctccccgtccactgcccccaccctgctccagcccccttcccctcccctctggacatcccagagcctcctccctggcctccctgctcccatccctgccccccaatcatatcccacaaaggggatatgactcactcacttaaccggcaattctggagggtcttaaaacctggctgcctcaagaggctttaaaatgttatcagatgggggccaggtacagtggctcatgctggttccccacttgcagccagagggagctggtgaccacctgagtcaggtcagggccctcccctggctgcacctcacaccaggtgccagcaaagccctgatgttgctctatttctagctcccacctgatctgcccctccctggctcactctgctctggcctcccactgttcctggagcactccccccagtcccccacaccagccttgggatctttgcatctgcaagtccctctgtctccgtgctgatctcacacacctcctgacactttctcacctcctgcaggtctttgttcttgcaccaccttcccagggacgctctccttgcagcgactgaaaagtgcaacctcaccccaccctccatgccggcactcccctccctcggtggcattttatttttctctgtggccccttcctatcttgtgacacataatatatcctacttatttgtccctttcttgatttgtctcacctactgagctttgagttccacaggggtcggggtttttgtctgatttgttcattgcagtggtgatttgttcactgcctaaaatagagcctggcaggtacaaagtgtttggtaaatagaaatcaataccccagggtctgtgacctgacttaggtgttaacaggttcctctgaggtgtgtggggaacagactgaggggtttcaggggacatctgttctcaccacaaattgccccccaaccagccccagacatgaacagtctcccgggagctccctctagccttctcgtatatcccagccctgcctcatgtcacaatttgtaatgatgtgtttggctgggtgacattttatggccatctgtctccctatcccctataatgtggtttgccgaaagcaaagcccaggactgtctcggccatctgtgtctccaggatcacccctcactgggcatggagtatgtgtccagttaacgcttgctgagtgaatgaatgaatactccatcctctgcctggagaattacgcactttagcatatccaaggctctgacaagtcctgcataaaagagcattattgttttctttctttctttccttctttccctcttcttttctttctgactataggatattgattatcaatctggcaatagtcaagattggcagtctggtgtattagtcaaaggttttcagcctacaaaagacaaaaagaaaaaataaactggctaaaaacaaaaggggatatgatttactaactcacttaaccgacagtcacagaggttcttcaaacctggctgtatcaaggggctttaaaatgttatcagatgggggccaggtgcagtagctcacgcctgtcatccagcactttgggaggccaagacaggcagatcacttgaggtcaggagttcgagaccagcctggccaacatggtgaaaccccgtgtctactaaaaatacaaaaaattagccaagtgtggtggcatgtgtctgtagctccagctactcgggaggctgaggcaggacaatggcttgaatccgggaggcggaggttacagtgacccaaggttgcaccagtgcattccagcctgggtgacagagcgagactctgtctcaaaaaaaaaaaaaaagttatcagatgggaaatgaattccgatattaaaaattgatatgtatttatactatattattaaagttatttttcataaaacatagaagggtaagtttaagaaatgagaagtatttataccaaaatgattaaatattatttaatttaaagatataaatgtcttgttggacaaataattcaaaatttccattagacaggaaaaataagttcaagagatatattgaacaacatggtgattatagttaataacaatatattatatacttgaacattgctaaaagatattttaagtgttctcaccacacacaaagggtagtgcatgtgttaattagcttgatttagccgttccacaacgtatacatatttcacatcatcttgtacaccatcaatgtatataattttgtcaattaaaataaatacatattttaaggccgggtgcagtggctcacacctataatcgcagcactttgggaggccgaggcaggcagatcacctgaggtcaggagtttgagactagcctggccaacatggtgaaaccccatctctacttaaaatacaaaaaaattagctgggcatggtggtgcatgtctgtaatcccagccactcgggaggctgaggcagaagaatcgcttgaacccgggaggcagaggttgcagtgagctgagattgcaccactgcacaccagcctggacaacagagtgagactccgtctcaaaaaaataaataaataaaaataaaataaatacatatatatttttgagatggagtctcactctgtcgcccaaactggagtgcagtggcacgatcttggctcactgcaacctctgctgcccaggttcaagcaattctcctgcctcagcctcccgagtagctgggattacaggcacctgccatcatgcctggctaatttttgtagttttcatagagacgaggtttcatcatcttggccaggctggtcttgaactcctgaccttgtgatccacccatctcggcctcccaaataaatacatattttaaaagatagaaatcactctggaaggagagttaatctgtttgatataataataataatatattaatattatattataacaatatattagtattatattctaataatatattaatattatattataataatatattattatattataacaatatattaatattatattataacaatatattaatattatattatgtaataataatactactccatatagctatggaaaagttcatatgaagaaaccaggctatgatctacaaactggcaacaaatttgttcttctattttccatatgctgtctgtgtacgtataaagtgagaggtctttttatatgagttaagggtgtgaccaaagacaaatggaaaaagacaaatgacaaacatactaataaagagcttcggtttctccacaaaaaatacaataataaaataaaatgttatcagaaatctcttgactctcctccacgttagctcactttttccctcaagagggtgaacatgacccttaacagatccagcctcaagtgctggattctcttgggaacttggttaaatggttttttttcttcccgaatgtccaagtcaccttccagacctgcagctcctgagcagccaacttaggacttctaatggagagtgaagttcccctggttcgcggaggggccggccacagcctcaaggctgctgttgattggtccgacctgagtccttgagtctggcagagtgccatggtgctctgtaatcccacctgtaatcccagcattttaggaggcagaggcaggaagattgcttgagcctaggagttcaagaccagcctgggcaacatagcaagacccgtctctacaaaacaaaacaaaacaaaacaaacaaacaaaaaaattagtcaggtgtggtggtgcacgcctgtggtcctagctactcaggaggttgaggtaggaggatttcttgagtctgggaggtcaaggctacagtgagccaagatcacaccactacactccagcctgggcaacagagcgagaccctgtctttaaaaaaaaaaagtccttgagtcatgattccagatgcaatcgcagatgtgggggctgcaaccctccgatgggctggggttcacgtctacaccacatggctggagcacaggccaggaggggctccggctggggaagcatgtggggagcctggctgtgggacccaggcggccccgggccctgtcgccctgcagtgcaggtcagctctgcggacgctcggctcatggtctttgacaagacggaagggacgtggcggctgctgtgctcctcgcgctccaacgccagggtagccggactcagctgcgaggagatgggcttcctcaggtactgggggccctcggaggggtgggagccgggaggggctggggagcaggcctaacccctgccccgcccagggcactgacccactccgagctggacgtgcgaacggcgggcgccaatggcacgtcgggcttcttctgtgtggacgaggggaggctgccccacacccagaggctgctggaggtcatctccgtgtggtgaggagggcagcgggcaggtggggcaacacctcagacccccaaggcactccctctccccgttttccttccacctgtcttaactggtctctatttcctttctttctgtgtctccaatcccatctctcccagtgattgccccagaggccgtttcttggccgccatctgccaaggtgagatcctaaaactcagaaccctctcctttaggcccttggggaggccacgtcccctcaagctccccaggatggggccatgtactttcagaccccctagggcagggccaagcctgggctctggggacctgggctccagtcccctgtcgccgccccctgctgacccttgtcccacagactgtggccgcaggaagctgcccgtggaccgcatcgtgggaggccgggacaccagcttgggccggtggccgtggcaagtcagccttcgctatgatggagcacacctctgtgggggatccctgctctccggggactgggtgctgacagccgcccactgcttcccggagtgagtgccccccaatggcgctgatgatggggaggcagaggagcggagagacagtggggaggagggcggattgtgcccaggcaggtggccaccctccacccctttccctggtaggcggaaccgggtcctgtcccgatggcgagtgtttgccggtgccgtggcccaggcctctccccacggtctgcagctgggggtgcaggctgtggtctaccacgggggctatcttccctttcgggaccccaacagcgaggagaacagcaacgatattgccctggtccacctctccagtcccctgcccctcacaggtaagtctaagggctgagccatggggcttgaggacccgaggccaggaggacagaggaggggaccaggggcacaaggcaatcaacttatggctcaggcatccttggcaataaggggaatgatctcgagggagcacaaagtgggccttaactatcaatgatcagtgcagccaatttggaaaatttgccagcatttccccaagaagtatacataaagttaccattggacccaacacttccactcccaggacaggaggtatatacctaagacaaatggaaactgtgtctgcaccaaaactcgtacatcagtgttcatagcagcattattcataatagcccaaagatggaaacagcccaagactgtttcatcggacaaatgcataaagaaaatgtggtatattgaccgggcgcggtggctcatgcctgtaatcccagcactttgggaggccgaggtgggtggatcacgaggtcaggagtttgaaaccagcctggccaacatggtgaaactccatctctactaaaaatacaaaaattagcctggccaacatggtgaaactccatctctactaaaaatacaaaaattagcctggccaacatggtgaaactccatctctactaaaaatacaaaaattagcctggcgtggtggcacacgcctgtaatcccagctactcgggaggatgaggcaggagaatctcttgaacccgggaggtggagattgcagtgagccgagatcacaccactgcactccagcctggctgacagagcaaggctctgtcatcttgaaaataaataaataaataacaaaaaaaatgtggtatatccacacaacgggagaatattggaccatagaaatgaatgaggtactgattcatgctaccacaaggatgaaacttgagaacagtgctgaatgagacaagccagccgcaaaggccacatactgtaggatgccacttgtatgaaatgtacaaggctgggcacggtggctcacgcctgtaatcctggcactctgggcagctgagatgggaggattgtttgtgctcaggagtttaagaccagcctgggcaacatagcaagaccccatcacttaaaaaaatgagctaggtgtggtgacggatacctgtagttccagttactcaggaggctaaggcaggaggatcacttgagcccaggagtttgaggctgcagtgggctaggattgtgccactgtactccagcctgggtaacagagcaaaaccttgtctgttaaaaaaagaagaaagaaagaaagagaaagaaaagaaaggaaggaaggaagaaaagaagaaaagaaaaggaaagaaagaaaagaaatgtctagaataggcacatcggtagagatagaaagttgattgatggtggcagggtgggaggtggggatgggagattgggaggtgactggtgaaggacacaaggtttcttgtctgggtgatgaaagattctaagtcgatcatgatcatggttgcacttgtctgtgactacacaaaaagccagtgacttgtgcctttaaaaggaattgtctaatatgtgaatagtagttcaatcaagctgttaccaaaaaactaataaaatgaaaagaaaatgtgttaaaaatgaatgaatcagacttagaaagtaagttaggagtcattccctctgcaattccctggagtattcccttggtcttactgagactcacttaggtgccaacatgtccttaacacctctccaacacatacatcttccttttggattaaaagcaggccctgggcttcagatttcagcaggctgcagtgtaataataataataaaaataggctgggcatgtaatcccaggccaaggtgggggtatcgcttgagctcaggagttcaagactcgcctgggcaacatggcaaaaccccatctctacaaacaaaaaaaattagctggctgtggtggtgcgcgcctgtggtcccagctacttgggaggcggaggcaggagaatcacctgatcacccaggagatcaaggctgcagtgagccatgatcacaccactgcattccagcctggttgatagagcgagaccctgtctcagaacataataataataacggtgataatgatgatcatgaagtagtaatagcgagtagtattcgagttcatgattgagtattcgagtatagcgagttcatgatcatgaagtagtaaaagggaataagggagtacatgatgagtgtacacaacacagtaaaataatctggtaaacatagcagtgtgccaggcaccattccaaatatgtcctgtgtatggactcacttagttctcacagcaaccccagcacaccctggtaaggagggttctcttaagatcctgttttccacccaggaaaaggtcccaacccaaagaaggcaaacaatgccccaaattcgtacagctggtgaacggcaaagatttgtgcccaggtggactggcactggaatctgtgcttgtggcccccacgctgtggtgacggagaatccagggccatgttggggttggcattatgtttatttttatgtttattttatttttcatgatctgtggtactggtttcccattgaagggagtgatacatgcttttctttaaaaccaaaccctgtcctgacatggtggctcacgcctgtaatcccagcactttgagaggctgaagcgggcagatcacttgaggtcgggagtttgagaccagcctggccaacgtggtgaaaccccatctctactaaaaacacaaaaattagccaggtgtagtggcaggcacctgtagtctcagctactctggaggcagaggcaggagaatcacttgaacccaggaggtggaggttgcagtgagccaagatcgttgccacacccttctccttagtgaaaagagtgagagagttaatattgaagtaaggacgcatctttgaggacaggtggacaggtggaagcggctgggatttcagacacagggctgagggggtcacagcatgggctttggggtcagattcagatatttgccaactgtgtgatcttggacacatggcttcacctcaccgtgcctcagtttcccttatctgtaaaatgacttcctagggttattgagacaattaaaagggttaatatgagtaaagagcttagagaactgccagcacatagtgaacactggtaaatgttagcaattgctactattgttgtttaatacttttactagttatatgaacacttgctgtttgcctggcatgcaactcaatgactcaccaatttctcactacaacttctggggataagtgattattatttccattctacatctgagagctctaagactcaggcaggtgatgtcatcagcaggcagcaggcagcaggcaacaggcagggctgccaggaacccttgcataggttgtgcactgcacaaggacaccacatctcagggttaccactctctctgtagacctgtgtatttattattatgattttctgctaggtggaagtcaaatgtctcaagataggagtgtctctctctctctctctctctttcttctctctctctctttctttttttgagacagagtcttgctctgtcacccaggctggagtgcaatggcgcaatctcggctccctgcaaactctgcctcctaggttcaagcgattctcctgcctcagcctcctgagtagctgggattacaggcacctgccatctgtaatcccagtgctttgggaggctgaggcaggaggattgcttgagcccaggaggtcgaggctgcagtgagccatgttcctgccactgcactctggcctgggtgacactgcaggcttagaaatgaaaacaagctgtgttaaaacatacatgttatgaaactttggacacgtgacttggcctcattttccccctctctaaaatgggataatatagaccctacctctctgggctgatgaaacattaaagaaaatggtgcaggaaggcgcctagtatgcgatgagctcttggtacgtggcgacttccgttgtggcttttttgtttgtttgtttgtttttgagacagagtcttgctctgtcgcccaggctggagtgcaatgacatgatctcggctcactgcaacctccacctcctgggttcaagtgattcttctgcctcagtctcccgagtagctgggattacaggtgcgtgccaccatgcccggctaatttttgtatttttagtagagatgaggtttcgccacgttggccaggctggtctcaaactcctgacatcaagtgatcctcctgcctcggcctcccaaagtgctgggattacaggcatgagccactgtgcccagcctattgtggttttttttttaaagaacagagagggcagggtgtgttaggggccatggtagcagctggacagaggtttgtaccaggtggggcaggccagcgggggctggaccagcattgtctctctcacagaatacatccagcctgtgtgcctcccagctgccggccaggccctggtggatggcaagatctgtaccgtgacgggctggggcaacacgcagtactatggtgagtcctgtcctctgcctctgatgccaccgtttgggagactctgaactaggctggggatgggcagtctggctggttggatgagtcttgaccatgaggagtagggacgctgaggggaatggggtgggcaccaggagggaaggggggtgtgtacaccccccagctctggccagccttgcctgcacacccccaggccaacaggccggggtactccaggaggctcgagtccccataatcagcaatgatgtctgcaatggcgctgacttctatggaaaccagatcaagcccaagatgttctgtgctggctaccccgagggtggcattgatgcctgccaggtgagggactctgtaggggcagccccctggtcgctgccaccccagggatggagatgcaggggagtgggtggtcaggctccccatctaaaagcctgagggctctggggccacagcccatgtcatcccggggtgggcctcctgtccaaccactttggccttcagccagacctccctctcccctcccagggcgacagcggtggtccctttgtgtgtgaggacagcatctctcggacgccacgttggcggctgtgtggcattgtgagttggggcactggctgtgccctggcccagaagccaggcgtctacaccaaagtcagtgacttccgggagtggatcttccaggccataaaggtgaaagttgggtccagatgggagccagggtggggacgtttgggtgtctaatgggggaagggaggcagagatttgttttaggaaacctacgctcaggcctagaagagggccccccttgggaacagatggactttgaagggttcctggggaagggaagccagtggtgggacgtggaagcctctcagacctcgggagcccccagctgtctttccccagactcactccgaagccagcggcatggtgacccagctctgaccggtggcttctcgctgcgcagcctccagggcccgaggtgatcccggtggtgggatccacgctgggcctaggatgggacgtttttcttcttgggcccggtccacaggtccaaggacaccctccctccagggtcctctcttccacagtggcgggcccactcagccccgagaccacccaacctcaccctcctgacccccatgtaaatattgttctgctgtctgggactcctgtctaggtgcccctgatgacgggatgctctttaaataataaagatggttttgattaa

SEQ ID NO: 961 - DNA, 32746 bp, Homo sapiens
  source 1..32746: mol_type = other DNA
aactgggggcgccccggacgaccatgagagataaggactgagggccaggaaggggaagcgagcccgccgagaggtggcggggactgctcacgccaagggccacagcggccgcgctccggcctcgctccgccgctccacgcctcgcgggatccgcgggggcagcccggccgggcggggatgccggggctggggcggagggcgcagtggctgtgctggtggtgggggctgctgtgcagctgctgcgggcccccgccgctgcggccgcccttgcccgctgccgcggccgccgccgccggggggcagctgctgggggacggcgggagccccggccgcacggagcagccgccgccgtcgccgcagtcctcctcgggcttcctgtaccggcggctcaagacgcaggagaagcgggagatgcagaaggagatcttgtcggtgctggggctcccgcaccggccccggcccctgcacggcctccaacagccgcagcccccggcgctccggcagcaggaggagcagcagcagcagcagcagctgcctcgcggagagccccctcccgggcgactgaagtccgcgcccctcttcatgctggatctgtacaacgccctgtccgccgacaacgacgaggacggggcgtcggagggggagaggcagcagtcctggccccacgaagcagccagctcgtcccagcgtcggcagccgcccccgggcgccgcgcacccgctcaaccgcaagagccttctggcccccggatctggcagcggcggcgcgtccccactgaccagcgcgcaggacagcgccttcctcaacgacgcggacatggtcatgagctttgtgaacctgggtaaggatttggggtaacgtaatgacgagaacatttcccccttttcagtgtcccgggcccaggggatggagtgagggggtggaggagctcccggcgcgcgggtcccgcctggtgcgccagagaacgcggggacaggcaggctgtgctcccgccacctgcgcggcggtgggcggcacatgcgctcccccgcgccgcgggcagggctgcgcgccgaggcccccagaggcggctggccggccgggccgcggggctccgggagcgctgtccccagcgggcgtgtatttgcggactccctgagcacgttccgcgctttttttcacttctgcccagctctggccaggttaactcaactgcagcaggagagtccagcccgagtgtggccatcctgggaagagggctcttcagtacgattttcccctctaaactgccgccttttgccccctaacttggagtgcagttttcccaccgagacttttagggaatccgacagcggctgggaactttgaaaacttggcatgagtatgtttagaggtatccacggcactaggggaggttgcagagggaagtcccaaaaggaccgcggaaggcgctcggatcccggccgggcggggctcgcttctgtttggggcgggatgaaagctcaactggggtaatccatcctgtgccccggctcacatgcccttggccattgtccccaaaggctgaacctttgatcaatgcagcccaagctgcacgggcagagaaagggtgcggggtaggggccggggttgggcgctgagctcctctgaaccggttgccaggcaacagaatggaaattcacgggcggctaaatggagctccgccacaaatgttctgtggcaaacccggacccagtcacatcgccctttctcccccctcccaccccactgagttttctcatctgtaaatgagaagggtgcagagaagactcttttcttcggagtcagtgcctccggtttgcactgcttttcattcataagctgacttagtttagcgcagacataggatggagggacgcgctgtcagcggacagatcatgggtgcactggctacgcccgggatggttgcagctgcgcggcggggtggggcttcacgggcctccttcccatgtgagacggtggttgtgcccaggccctgaagtgggtgagcagacactcgccaaaggagcacacgggtctcccagccacgtcaaagacgctcatcttttaacggcattacttactggaatgattcccgcgtagactatctgggtgatttctttaccagcctatctatgattcccaactccactgagctttgagggagagaacatggggggtaagagccaagggagggtgtggaggcagggcgattggcatccaagtggtgcagaaatcctcctgggaaattcgtgaaacagaatctcacaggagtccaggctcagggcctgccaatctggctgcttgcactgcccggggttctgattggacaagaattttcacaatttattggaaccaaatccaaggttgagccacctccaggaagcattctaaggaaattctcatgccagtcaataaaatttgtagtgggtgggggccagggtggcagaggaccagcgctgttccttattctaacttttctgctgcttctgacttagtaaattcctccccttgctctcttcctctcctctccttccaccctcaccccccgcccccaccccgcctccaggtttcctggcagctctggggaaatgttttattgcctcttgggggtagtcctaacctggacaaaggggaggaagactggcgctcctggctacttcacagagaatcgtgttacagtccctgggaaaacaattcctgggcttgaaccgaggttctcagcattagctgccctgtagtatcacccgggggacttagagttctagggttattagggccgcttcgtgggcccagatcagttaggtcagaatcttttgagggtggggcacaggcatcattttttttaagtaccttaggtttttctaatatgctaccgtggtcaggaaacactggcacaggagatcccaatgtctgaaggaaatggatacattgtcccagtaagagatgaagagcaaagctttcaaacattgctacacattagaatcacgtgggtgttacgtgggaggtaggggggaacgccttaaaaaaacccagatgcccaggtggcactccatatcaaatcagaatgtgtggaggtggaaaccaggtagcagtatttttttgttcaaaaataaagaggatctcccaacgttgcccaggctggactcaaaactcctggcctcaagcaatccccctgcctcagcctcctgagttgctgggaagatagaagtgtgccaccatgcccagcagtgtcattgttttgtcaagatctcaggtgatgtcagtgtttggaaaccactgccttagatggtatttgaaatttcaagagctgggcctaaggcgaatttgtaaagtatagtcatatttactgtatttagtgaccctccaaattccccttattccttgcttctctgacttttcgtgggctacagggacacactgcctctgagtcacactgcttaaagctggctgtcagctaatccttgctagggtgatggtttaacatagtatctccctagggatattgacatttttcgtaaaggattttgaaagatctaaaaaaatcccctaaaaatttttaagagaactcacccagtagtgcaattccaggccccaagacaggctgacacagaactgaaagagaattctaggatgggaattctatcccaagcccctcatattcctatcactgggctccttgtacaagttatagctactgtaggtccacttctggactctatactgatagtgtgaagagaaaaccttttgcgggtaagtagaatccaagcagcaagccatgccacctgccaatgaagcaattctatttcatcttaatccatgtagcaataggaaaggggtatttcatcatcagaggctagaatggggtaaaatctgattgccatgactctgaacataggaaggacagttcatttgaacaaagttattgcgtaccaatgttggattctctatatagggatactagagaattacagatttcctaattgctgtcaatgccatgttaactgccacattacctgactcatctattaaagaatctacagaaagataaacatgacagcgctgcgttttaaagtacgcttatacctactaggttaagtaaattacacactggaagtacaagggaaagtattacatagttgtaaacatccgacttccctgggactgggggaataatttactcatgaaatacatttgaaacaccccgagccttgtaagccagccggactatcaggaagtgtgaatcaacaggataaatttctctctcatagcgcaagtgctggtcatccaaccagctcattgttgtttatgttgactgtttcaaactctttctgggtgaataggctgggatgtgtcaccttctaaatgctaaccgtctgctgcctgggctgctggtgtgcagagtgcctgggtgagcgagctcgtgaacttgcattcactcagggccacagatgccattttctatttgttttctaatgctaaaaatgtcttggcagcctagtcagcatccctgccaatttggtgaccttggagaggtatccttcaggtcttagcttaaaattcacctaagagagaccttctctgccactctatataaactggtcatgcctccatcccacccacttctgtaccatgacagcactctgcttatttccttccttgtacttatcacaagtttttcttttttcttgttaaatttgcttactcatttgtttgtctcccctgtaggatgtcagcctccaaaggcggaaaccacgctaacccaccacagtagcccaagtgcctaacataatgctgaccacatggaagatgctttgaaaaggctgaattagtgaacatatagacatagcccatgcttcaaattcatatttcactgatttggaagatttgattatttagaaagggtatacctgatttttattgagtaaaatgtttacagtgaagacatttaggacagggaggttcacagtatttgaggtaaatcatcgtgctttattaatacaccttttttattagtcacccatatgtatattaatttgtaatatgcattacatttgagagtagtaaaaacatttaattaaatatctgcatttcagatttcacttgtttatttgaattcacgaggtatttatctccaaatgctaggattaaatggcaatttaaaaaactcaaattgtgttcagaaaagggaatcagtatatattagtacaagcagcaagaaacttgtgctaaaaatactggcaattttctgaacaaaattactcttgggaaacataaataagaagaaaaatggaatactccctacttgtatttgtaactagatataatgcgctatctctttctcctaaacatagcatcagtagtactgtttttcatttaagctacctgtacttaagaagatttttgttagcagaaaataaatccatgcctgcaagctactcacagcaaaaacagtttggagaatttggttgcaagagtgtgattcaaagaagcagtagatgttcttctaaagagattacaaagagtaaatttgaaattcagtggcatttcaacaaaaaaaagttgtacaaagtgttcttaaactaagatcaaagggcaagcagatactattgttcagacctcagatggtgtttcctctgggtgtccttctaagaatgggtataaatcctttttaaatgtgctgaatcatggttagttcctctatttgagagcttacctctgatcagcttggaggagggcttccctgggataagaatctgtttaaatacaaaaacaatgctcagtgcttgctttagcatataatttgttgcctctctgtgtcttcagagagtaactactttatatgttggatttcaaattgatattttacttgactatgaatactggctaaatactggctatcaaatgtagtatatcaaacgtagtatatcaaacgtagcaaactaaaagatagcagctctgctgtctttgcctcactcctatttacgaaggtgagttagacaaggaaaatgaagagggtacaatgtcttgcatcatgaagcagctttctgtaactttttcacaaaccaatccttcactttctgcttcccatcttatatcaaaaatgaactattctagggaatgatttttttttttttttaagacagtatctttttctgtcacccaggctggagtgcagtggcgagatctcggctcactgcaacctctccgtctcctgggttcaatcaattctcctgtgtcagcctccagagtagctgggattacaggtctccgccaccacacctggctaatattttttttttgtatttttagtggagctggggtttcaccatgttggccaggctagtctcaaactcctgacatcaagtgatctgcctgccttggccacccaaagtgctgggattacaggctcacgccactgcgtccggccaggaatgactattgtttaacttagcacaacgtcgttacagttttaatttttctacttcgatctttattctatttttcttcctcttctgttcagaattttagtcattttgccatctttggtgcttccagtagtgggaagaaaagtagacaatattttaattagacaattttgtttttcactagttttcataaatatatgagtaaaaggagtagaaatcaccgcagaaactccctaagataggaatagacaatttaccaaggccccattcacgtaaacagctgttacacattaaccatcctgtccccccctccctaggccacagcataacccagccatgtgcccagcagctgggctgctccagccgcagggtgtcacctggggggcagatatagggcatagctggcatcttctcttgtgttccccgcaaggaaccagtgcattatgttgttcttatttccctgttttcatcacgacagcggagttaactttattcaaatacactttcttttctgatcatacccttaccttctcttcaacaccctcactcccatctctgatccagcttttacccactggaaacgtgtgagtcggaaaacggcactagtctctcctggaatatatgaaagtggtgatagttgtatgaaggggaaggaaagccatcaccacttcggtgaaaattagagttaactctaatttttcagtgccattaacctctgaagtttcgagagtaccagaaattctcagaacctgcattccccctgttcaccttttactacaagcattagaaatcagtaacacattgtgggtcactgaaatttatcagattttgtgttcagtcactagtgttttgaagattttgttgtctatactttttttccaatgtgaatatgtagtatttcagcaccctatgcataaagttaagggtctgaagccaggctgggaacacagctaccatccctaacatggtttttctggggacacgtatgccccagcaacagaaaacccatttggggtttattggttaaatgagtttgggataactggtgaatgtatgttcgccatagatcatagaatttagagcttgaaaagttctcgcatatcatctaatctgtttgttcgcagttaaatttgttagatgttttcaccaccattttctctttactgctgttacctcttaagattgagggacaatccatgaaaacacacagagatcctagtgcatcagagcaatagggctgttggccaggctggagtggataatgaaggagaaattacaaaagcaggcaagagcacaaccctggaagagccgaggaaacccaaatctggaattgttggggttttctcttagtggatagcatcttctccaagaactctacttttagaaaagaaaatgctatgtatatctataaatgtccaaaggactgttgactccaaagaattgttttctgctccgaaattgagttgaaaaccacgttgctctgagtggcattgttccactgatatccactgattctcttcctgcccttcccatctccattattaaggagattgggaccataatagagatgatatctaaattacatcagttaattccttgatgggtccccacggtctcgttatctcaagcacagtcccagatgactgggtcgaagaatctccttcaaacatttttgcaggatgaggttctggttccaagtgggagagccttcctgactttcagatttataggcatacgcccttgatgactgatcctcctgctggccaggtcaggattgtcctaggcctaaaatgtccttgccacacagtgccgattatatgttcagattgttttcatatcaccaaagagctcagctggccacggggggaagtggagtggagtggattcacagggcgcagaaaacagtgcccctcggaggcagagccccggagcccgctccaccctgacctccgatatccgccacgggccttattatcactctcctgccgcttgccctttcaccgtccagaacgtctgcgtttgttgattgttgttgctgtgtttacagtcctgttggtttcctgtacgtgaacatgggctggaaaaaaaattctgatttgtgtctcagcagagcatgagtgaaccatatcattggtaagagctgattaggccaggagatttcttataatattagccttgcttattctctgagaccagttattttccctccctccttttgaatctatgaattacatttaaatagtccaaagactgagttttgtaaactacaaaattaaggactaaaagtttttacttaattttgatttttattcagattttatttgtagactcccatatcggaataagttaacaacggagaagctgtacattttttagaaagagagggtttttttttaagatcagtttgaggttcacagcaaaactgagcaaaattttgcagagatttcccaggtaccccctgccccacaggtgcacagactcctccattatcacccagcagaatttggtatctttgttgcaattgatgaacttatatggacacatcattgtcacctaaagtctgtagttacatcccggttcactcgtagtgttgcagattctgtggatttggacaaatgtgtaatgatgttatccaccgctatagtatcatgccgaggagttgtgaaactactctgccctacaaatcctctgtggagaagctgtacattaaacaaggaaaaacaagtcaatgaaagtataaaaattcaaaatacgcagagttcggggaaagaattataaaatacctcagttgaagaatattttgtttctggggttttactaaagtggtccctaaggaagtaattttgatagtctatgacaatgtgggatttattttatagtgcttctatgtgttgacaacaaatccatcagaaatctttcttttttctttctttgtttttaagtctaggagtttaaaaatcttttttcctccgcatagtttgactgaggtgtctgtcaccatagtacctagacaatccctcaggcagagatatgagtgattaaatttctccctggcttgtgccctgtttgatccatgctaggcaggatttgggggagtaaaataaagaagcctgaagaatgaacaagaattataggaattttgtgcttgtgaattattaaaatttgggggggttattaggggagaggttaaatatttttcctttctgaaaacttacattaaaacttaatgtgactttagaattgagaaactgacaaaatatcgtactggccctaagggcaggatcagaggactttaaaaggcttcctcaggagagactatttagatcagagtaaaactaaattaacagagactccatcaattcagaggtctttgtaagtgatatatcgaataggcttatttgcctttggactgttttctatgacaaagctacacaggttaatggtaaataaatatgagaatacaataatggagacagaaatgtggtaactgaagagcagttcgtttgagggatattaggggtttgtgtttattcctttacaaatattgtgcaggtgagacatttagtgaattctctccatctctcttcacgtcagttactcattgtagtggggtattactgaattccagctaatttgcccgcccgttatctcccaccctattctgctcccttacagaggaaacctcttaaaaatggggaagagggccgggcgcagtggctcacacctgtaatcccagcactttgggaggccgaggacggtggatcacttgaggtcaggagttcaagaccggcctggccaacatggcaaaaccctgtctctactaaaaatacaaaaactagccaggcgtgggagcacacctgtaatcccagctacttgggaggctgaagcaggagaatcgcttgaacccgggaggcagagatttcagtgagccaggactgcaccactgcactccagccggagtgacaaagcgagactccatctcaaaaaaaaaaaagagcttggggccatggcactgtcactgggcttgagaaattcagccttgtctcataacatctgacttaggatgtcctgtggtttaatacttctctgtgggaggataggtgtttaatggagcaaaaagagaagtgatatccatgggcaggactaaggtgtatgaagggaagagtaagaaagccataggtgcctggagccaaagatatctggagagttgcctttccccccatggagaaaggccatgcatggagcaggcctttgcatttttatggggtctgtttagggcagagccttctaacaccaactcttgatttgttgagattgtttgaccctgttgttatgcatgcacatacctgtcatcgtaggatgatcccacgtagctgcaggggtgaaggaggtatccagtggatgttagagtccctttctgtcttgctttccctttttttttttctcttcttttcctcccattaataaaattggcaactccattgcacttatttccactttcgtatgtgctcttacctatagttttggagcctttgctatggatctagcagagcagattatacacgtccatggagtctgggagttttctaccacagaaatgactcattttcacccactgcaatggttaagtagctggttttcttgacagtgctggaagatgcttatgatcggtttattatagaggaaagagaactggattaatatccaggaggcttgaatttgggctctagttcttagtattattcttttttgtaatattttcttcttttttttttcttcttttttgtaatatcttgttcaagccacttaaccaaatttctaggtctccttccttgtctggaaactgtattggctagatcagcatttttcaaaaagttactacttttccaaaatgttctgcaagaaaaggccgtagaagcactttctattctattcctctctttgaggtttacaaatctttctcctgttaatgccctgacaaggccagaagtaaagaagcctgctaacttggttcagcagagtttgaactgacttttactctctaaccccttttggctgaaacccccttgtgtcagacccaggcctctctgcccccacacccactcctgaaccttctcctgttgtcctcatagatcaggggagggaccctaggaggctgcgtttccagctgctctgctcttctgtggctccagctctctctggtccccatcttatgctagggaccccttggctctcctccctccttcataagagggaacgtggcttcctgcagttgccaatccatgggctgcctcaccacgacctgcttggccgtgtagccctcccgcttctgtgccaccagatccctgcattaaatcccctctgttgtaaactcttgcagaaggttctctgttccaggttggaccctcattgctaaaggctcttaattccctggaacacagttgagaaaccccaggctagataattcccaagacgattctttttaaattttttggtaatgcagcttaatttgacacattgacgtataaggaacagcttaaagtgtacagttcgataaacttagacataggtaggcatggctgcaaccatcatggcagggaagatggtgaacacattctgagctacactttaaagcatctcctgtgctagggaatgaaatcatcactcccaacacacaggaagtgctgtgcaaagtcccatctttcatcgacaccttggctcttcttgcttttctcttacgggctttgtacatccttaagaatggaatttgctgaagatcctcatggcttgttttcttggatcagagaaccatggggtcaaatcttcatagggtcaagcctgctcttggcaactgtgattgacctttaccctatgtctcactttccacattgattttgggaaataataataaaaataggcagacttcttttctaattttggaagcaagtgtctgggggtagttttgcgttgtggtgaccctgtcagcattttgtttctaaagactgtaatttagaagatttgatcctgccggaacacagcacaaagatgcttccctgtgtttctgttttaaatttgggcaatttgggtagggcacaaatccaagaactctaggaaagtagactccaatttacccctgacattttccctatgctcatccttctccaaatattctggaagcttaaatagaaactgcatttttttctgcacaaaaatacaagtactgtatttctttatggccttttgccttaaagaatggctgatgtcacttattatcctattatctcagcaaggcaaatacttacacttttacagctgcagatacataaaagttcttacttttacagtaagaactagtagatagtaagataggggagaatttggaggtttttggagaaaactaatatttagagcaatgttaactgaatgttccaaatagcacccagtcatgtaatagaacagttttgtgaaataactgtcccctacctgcccaccatttggggaggttactctttccttcccactgtcttctctgcccttgtggtctgacttccatccccatccatctgctgaaagtgtttcgttgaaggcagctaatgactgtcctgagtcttcatcctcctttccaaaagccttgatcatgttgacgatgcttttttccctactgggctattttttagcgcttctaaaaaatcctctccttagtttctacaacactgcctgctcactcttggttcctttcctgtcttgaagactgctgctgtatttggggatattttctgaaatacaacaaaagattcagaagggttggcctgtggcatgagacctgcacactgggctgagacaggacacaggcagggagctgggcatagggaggaggtcacacccagttgcaggagtaaagagagaacatgtggccataggtcaggatgatgggcaggtaccaggctcccaggtgacctgccaccaaggctcggtggcctggtggtagctgttgggttcagaaagtcagatgcatctgcagagatgtcccccagctgtgagtgcctcctcacgtgtttgccttctctcttatgacccatctgttcagagcatgcgccaagtgtggtcccatcccagactcatgcagcacagcttttctcaaactttgtgcaacaaccacttgtttttcaaattttttagtttttgtggacccatacttttgggtccacgaaaattcattacaagtgcattcgtagaaaaatgacatggaaaaaaacccaaaatatgttcaaaatcaagcctcaacttttaatcattagattccatttgtagaaagttgtcagtcagcttgctgttaaaccatctaaacactccatttctgtactctcattgcaagctggtaacaaagtttgtggatcagcacagatctattaacaagcagcttcttggaccccaccctgactcgggggatttgggtgtgggaatctgcacttcgacaagcggtgactgaggtttgggaaccacagtgctagttactcaggcttaacttcaatctttgccctctcgcccacatcaagtcagttgccaggcttagtgatcctgcttttgaaatctcttactcccatcttcccatcatcttttccatctatccctaagttccctgcagaaggtctttataatcgttggccttgacttttgcactggtctctctgctgtgaatccctccctgcatccctgacaggctggcttttctgtggtgcaggtgtgatctgttagtcctcctccatcaccttcattggctcctgtggccactagattaagctgatgtctctgaggtccaccctgtccatctcttctactcatctttccatatgctgttatccagccagcacactctgctctgtgattttgcctatttacctggtgaaactgcccactgccacattctcaattctgttttttaaaccccagttcaaatgccatctcgttaagaaaggctttctgaaatttgcttacccatgtgccatggctctttagaagaacatttggggccaaatgacaggggacttgtcctatgcagagaggcatggagcagcattctttattatcattattattattattatttttgtagagacagggcctctctgtcacccaggctggaatgcagtggtgcgattataggtcactgcaaccttgaactcctgggctcaagtgatcctcccacctcagcctcttgagtagctggactactaggcgtgtaccaccatgcctggctagttgttttaattttttgtagagatggggtctcattatgttgcccagactagtctcaaactcctgggctcaagtgatcctcccacctcagcctcttgagtagctggactactaggcgtgtaccaccatgcctggctagttgttttaattttttgtagagatggggtctcattatgttgcccagactagtctcaaactcctgggctcaagcgatcctcctgctttggcctccaaaagtgctgggcttacaggcatgagccaccagacccagcctagagcagcattctaatttctgatgcctgtttgcagctgagctgcatgaggcttcaacgaaggagttggaggtctgaagttccagcgttggctctgctacccctcagctgtgggatttggtgaatcaccttcaacactgacttctctgattcctatcctattaaaatgttttattcatctttgacacatccctcctccccccaagtgcctagcatggtgcctttccttcatcgatacccaataagtgcacattgaataaatgtcagtttctcaaaaataaaactggtgtatgccgtctccttccattctctcattacaaataacatcaagcatttgaacgagagaattacaaactgtgaagcatgtgtgctattataagaaatgcttattaagttctgtatgtggcagtggttataaaaagggaaaagagaagttaccttcttgcagggtttatgttctgtgactttctaaatttttttaaaggctttgggaagaagaaatattattttccttctatctgatgtcattatgactttaataagtatgaatacaagtcagaaagacatgccgctgagtctcaatttaaatttcctggttgtgccaggcagaaagcttcgagctttcatgcatgcaaggaggcacgactcttcacgcaggtgccgttgcagaatacttatcttgtcagcttccacttcaggctggtaggcttggcatacattgtgaaggtgttagacattctgtttacataaggactgaggggtgacataatgtctattgaagcaaagtcacttagctccccgctaggcaacagggagcatttaaaaactgaaaactgatcaaagccatgggcaggattgagatacctttacccagggggcgggtggtctcttggttcgttgcccgaaacagatgtgcattattgcttcactgtatttccagaccattggtgaaatgaatcaggcagaattaaaccctgagtggccaatccggagagcctgcttaagtgggcacaagtgtgtccaaataggttggaaaaaatgtcaaatcagagtaggcgcatacaagatgtgatgtttctctttttatagactgctataaaagttgtttaaaattaaacaacccttcagtacttaaattatgtataatgagacaggtaggtcctggaacagagatctttcccccccttcttatcccacttaaattttgcactccctaccagagtatgtgagatataaacactttcatttccaggatatagtgtagtcttaggatggagcaaagggagagagagagatggcttgacatagaccacagaagtagcaaatatctttcacattttattccatgaacttcaaggatgtagccaagggaaaaatgaaaataatttcagatgcatctgtcctatcaagtggtaatcttctgtattttacacttccaaaatatatgtagatatagaggaaggtgtattctatagtgtatactccctctacccccctcccaaataagtagtttattgctgttttgctttttattttggggggctgtatttaggaacgaacaatagtatataatgttgcattattcagggttgacaaggttaatgtgtcttgacaatcgaaatatctgtgccctttttttccatttggccggcttctgttagaatcatttatcttgtgcctgtaggatgcaatctaactggggcactgctattctcctctcagtgttggatgacatgagatgctcttttctgaagccaatggattgggcatctctgatttcttgttcacctagaggactttgttttcagggcaggataaatgcttgtttattctcatgcatgcatgctctccctccctctctcattgaacgtgatgttttcgtggccccttggtgcttgagacctggctcataggaagctgaactcagaatcaaaacttctcctgaggtgccacctagcatcactaaccccagagatgaccggggtagccctgttaacactacacaaataaaatatgtcaccagaacatttcactgagatgaggaatttatttccatgattctctaaggttcaactatagtacatgctgctttttcctactgggcagcaaacatgttttactaaactcttacctaagtgctttctgtttacaattccacaatgaattcctgtcttccttcatgttgatttctacaaatattgtgatttacttccacacctttttgaggaagcaaattccaagttgtgatgcatcttttaacttttatcagcattttattgtgaacaaaatttcaacatatggaaaaaggggaaggttttacagcaaatatctgtataccctccacttagattctatgattaacatttactgtatctgctttatcaggtatctattctgtttatccatccattttcccattcagctgtccatcttttttcttttttgatacatttcaaagtaaagttgcagacatcaccggacacggttgctcacgcttgtaatcccagcacttggggaggccgaggggggcggatcacctgaggtcaggactttggtctcaaacatgaagccttgtctctaccaaaaatacaaaaattagcctggtgtggtggcgggtgcctgtagtcccagctactcgggaggttgaggcaggagaatcacttgaacccaggaggccgaggttgcagtgagctgagatcgcaccactgcacttcactctgggcaacagagtgagactccatctcaaaacaaaaagttgcagacatcagtacactgctttctaaataattctgcttgcctgccattaaagttcaatgtttatagatttttgaggtaaaatttctatacaatgaaatgcacatttcttaagcataccatttgatgagttttggtgtgtgtatacaccactgtaacccaaacctctgtcaagatacagaacattactagaaagttccctcaggctgcttgttatctgccctgagcatgggtggtccaggagtcacccagaatttaggaccataactctcttcatctttcctttctgaggttcccttcctttctgggatgccccagatctgttctctgattctccgggcagaaaggctgttggtttcctgttggcattcctgctggccagcctggtgcagaccaggccctccctttaagccagaagtcatgaaattgggaaatacatacagtgctgtttcccgcctccagtatcagtgcccagaatgtgcctagttttggtcaatctccagtgccttcaggtagctgggtgttattttttaaaaatcatttttgccagagtttatgtttctaatctgtgggagggtcagtccaataggatcgtattggccattgccagaaatggaactctgttcattgttttaataattttctgtgtgtggaatgcccaaaagatctatttataaaaggatttcaaatagcctatgaaggaaaaagtgtataggtcctgttgctgcattgtgttatgttctgggagatgcagtgacagtgtgtctctaaaaaaatggcatctaaggactacttgacacaccctgaacaaagagtctcactctgtcacccaggctggagtgcagtggtgcaatcatggctcaaggcggcctcaaactcctgggctcaagcgatcctcccaccctagcctcctgagtagctggggctacaggcgtataccaccacactcagctatttctttttttgtagacatggggtctcactatgttgcccaggctggtgccttaattcctggcctcaagggatcctcctaccttgtctttccaaggcactgagattacaggcgtgagccaccatgctcagccttgaataaaaggtttttaaactcagggagtgtcttcagtgttagacatgacagagttaatttggttgtccagtgtttattggtccctttcaaggcactgtggtgagtactggctgcagtagggagggggcaggatgaggatacaaatgacaggaagatgtggcagctggcttgagggaaggaggagatgcacagacagctggcccaaacagagcatgatggtatctatgatagaggtgaaaaaaaaaagaggccgggtgtggtggtgcctgcctgtaatcccagctattcgggaggctgagacaggagaatcacttgaacccaggaggcggaggttgcagtgggccgagattgcgtcactacattccagcctaggtggcaagagcaaaactgtctcaagaaaaaaagagagagagagaatattgagggagcaccaaggaaggtatggttaagttcagggtacatgacattcaggctgagcgtggaaagagaatttggatttcccttggtaggtatagaggcaaaggcattcccgccggaggaatgcatcaggggcagtgttgattcgatggtgctgcgggagccctgagaggtccgaggtgcctgaatccgagcgtgagtggctactggtgctggcacagtactcggcaggggaagagattgcaaaggtaggctgacgccagatgctgagggataatgaagccagtctaaggagtttggactttattttgtaggcaatgaggaactatttacaactttttagtaagactgtggaatgactgatgtgtgctttgggagatattcctggctgcagtgtggaagaggcctgaaatgggagacgaactggggcatttttgcaattgtctaggtaacatcccccctcccgtttaatctgtatttacagcatttgagggtctttttgaaattttaaaatagtttacattttttctttcctgcaattaaatttagactgtttaaccaagaggggcaattaggtgacaaatttgtgaattgcacccaagagatgaaaacttgtggaaaaagtactaattccagtaactaaaatctgaaaggttacgatttaaatagacatttaaatagacttaacccgatcctcctggaactctttccctcattcctccttacaattaaaaacacacctttgtgagctggttgcttagaattaggagtgtcatctgccgtcacggtgcagacggtattcgcgtctttgaagctagttggcccacgggaaacttcatcagtgagctgggccttgttcacaggtgctcagccacctgaaatgaccagattgaaatccagcttcattttccacctggtttgtctccactctgttggccaactcacacctgttccaggtagcgtgagagagagctgtcatctcctgggggtggggattggtcagtgccagttcaaaccggtgacacactctcctcctttctaccttctgaacgaatcccataaggcctggctcttaagaaagttttatttaccgaggacaatccgcaaaacttcattacctcggttcacaaaaacaagggcagccctgcgtatgggagatgatttagagaagtttagatgttcgatgtcagtgtttgcggtaggcaggattccagccccgtgggcttcgcctcctggtgttacatctgtgaatatgccaccttatatggcaaaagggaattatggttgctgagcagctggccttaaaatagggagattatcctggattattaatcacataggcccttataaacacagaagaggaaggcagaagaatcagagggatttgatggaagaagaggcaagagggactcgaaacatgagcacctttgaagatggaggaaggggtccccaggccgaggaatgcagtggcctctggaagctgggaagggccctgagctgacagccagcaaagaaatggggagcccagctctgtacttgtgaggagctggattctgccaacaacctgaatgagcaaggaaacatatcctccctcttccctccagataggagcacagtcctgctgacacctggttttcagcacagggagacccctgttggacatttttttctttttcagacaaggtcttgctctgttgcccagactggagtgcagcggtacaataatggctcactgtagcctcaacatcccgggctcaagcgatcctctcgcctcagcctccccagtagctgagagtacaggcatgcactaccttgactagctaatttttttttttttgtagagatggggtttctccatgttgcccaggctggtcatgaactcctggcctcaagcgatcctcctgcctcagcctcccaaagtgctgggattataggcgtgagccactgtgccaggctatggacttctaacctgcaggcctgtgagagaatacatttgtgttgttctgagctgctcagtttctgaaggcagcaataagaaatgaatacagtgttatttatacagggctttgttcccttggaaccttttaaattggagtgatctgggatgctggcatttgattggcaggtgctggagtcagactgtgtttgaatatgggccttaccccttagagagtgtttggttttcggtgagttttcctctctgtgctccagtttagcactgtgaaatggaaataataaatgcattgggttctcagggtggttgggaggattgagataatacatgtaaagagcctagcccagtggttggtacctcttaagtactcagtagttagaagcttttattagagttgtttgcaataaggggccattaaaaagatcttcctgttccatacctgtcatactatttcagacatcattctcttatgctaagagcaggaaaccatcaaaaagaaaactggaacagtttaggcagtgcttactgggtttctgaggtctagaaagcacttatatatgatggaccctctggcacttgagcagctcatgcttatgagagaaacctacgaggctgaagcattatgtcaatgcaggggaaaatgaagtagaacccttgggggctatgccagtttggaggaccacaaataccccgtgaataagctcagttcctacagtcagcttctgactggggcggagatgtttcccattattaagcttaccgaggtgaatgatcaagattcattgccagtgtccagataatcatcatgtcctgagaaatatttccaattccttagtcgtgcaatttcagaatgtcatgctcccataatttccatagtcctctaatgctcttgcatctcaccatacccccatctctaggattgtgaatttcctgctatgttatgatgatgtcctaatcctggaatcagtagaggatgaatctgtcaaagcaaaaaatcgagaaatcctgtattatttagcagcatcaggtgtcttggtaaaagaggaaagacctgtagtaccaccattttgatcttccacattgatgctactagtattctacccttcaggacaagagcttagcgctttcctgcagatttccattgtccacagtgtgtttcatctacaaaaggcaatcactgatgaacccttgtacctccaccggggaggggtggagatcaggattccacgtcaccaatatgatttgcagagtatgaagctgtgcttagctcggattgccagtatcaggaaaattcagtatttttctaaccaactgttgttttatcttatgaatattgagactcttataaatgaacatgtttctatattctttggtcacttcaaaagtcagatcaacctctctttatcatatggtatttagtatcctatattaactgtatcttattttcttgccccattttcccttcattcctatttccacatatgttcaatgtttattccataaaatggtatttctataagttgtctcagatctattttcagaacgaggcaggagcaaaacgaattactgctcaaaatcaataataaatggtcaaaggaactatagcctgttgtcatgggagccagtaggtcccacacctatctctatggtcatgcctttgggactctcctctgaggatgagcctacaccctgtattatgtcaccatatgtgtggggctggagtcttttgccaagtggttatgtgtcaggcacagccctgagtgcagacgggacaccgtgacattgcctggttgattcattgtgaaggcatcactaccaggtttgacttgacatttaactttcttaaagtatggttcatggataatgagcatcagaatcaatggaggggcttactcccagagatttcaatttagtatgtctgatctgggaccaaggaatccgcattttaagaagcatcccagatggtttttaatcaagtggttcatgggccagattttgagaagtactgccttaaagggttggtaggatttaaagaggcagaggtgtgcacttcagagtatagaacgggtggaaacagaggcacagattctggcaatgggcacagtgggtgagacaggatgcttaagggtgggtgccatgaaccctgagggtgcttttactcactgtcaatgccatttgtagatctacatcaacattgaaacattcaacgtcaacatttgagcgtgctagctcaaacatttaacatgttgtgtgcccttgaacatctgcgtgcctactgtgtgctggctgatttgccaggtgccaaggatcctgaaatactaaggccacattcgtctaagagcatgctgttccaaaggagaggctgacgtgtagatacatggaacttccgaactgcagaggtaccatgatagagatatgtttgggggagtatcaatgaggaaacgataagggcaggatgaggaagcagaggagatctgaaactgaaagccgagcagatatttttattctttggagtttctgaaattgtgcagtgcagtgttttagcttaacattctcacagtgacttttgcaataacgataacttatttttattggatggtttgcttgtgtgttacctgtctttttgctgcttaattaaatgacctatataaatatagcagccatgactaggtgtatcttgagatttttccagctggttctggaacttgaaattttttttaaaaaagttaaaagtcctctttgactttttattccctagtcttaaaaacaaaatgacctttatttgaaagatttaaaatggcaagattttaaataacttggctattttttatttctttttaagtcaggtttccatggtcatcaaacactttatgactaaatataagataacttcctcactcttgtccacttctgccccattctgagatgtttgagctgtaattctgcccaccttgcttcttgtcctgaactgtattagcagtgatgttggatggatccatctcaggatacagcttaagtgactctaatttagagtgagagctaaaattctcaacctacttatccttggctacaacccaaagtttcaaatgttgttggattactctcttcccggccatattaagctcagtgcctttgatgtagcttcaaggcagacttgaccaagtggtattgcctcccgctgatatttaggtggaagccaacactataaaaatgaacgttttactaagagtactcgctctactacctgcaaacccagccagttgctctgccaaattggtcaaagaaagaactggcttgagaattgcaaagtgtgttcctctggcaaagaaatggagctcagatcaatctcatggggctccctaactaaaatgtagtagacatgtcaaacactttaattggaaacttcccaaaaatacccatcccaaatgcttagtttattataaaagcaattttgttaagaaatgaataacaaggatgaatctttgatatctttttaagccttactttattcttccactagcccatgcacctgaatttctaggatacaatacctaacagtgcagcagatatttcagagtatataattgggttgacacatatattttctgcctcggcattctctataaggttgcagaaagatctggcgatctggattacacagaaacatcattaaattatatttacaaatctctatggaacaaccgtagcatgttaagacctataatggccacagaattagacatggcttctgtccagtggagtcacttcattgggccaattacagatgaactggcaatcagaagatgcccagggatctccttagcctaattttcttagttagaatgtaagatgttttctttgttagtcaagtgagactgtttttcaagaagtctaatctggacctctgagtaattgatgacataaaatgatgcagaatctcagaagttatttaatggtgtacctttgaatggtgtatacatctccttcagcacaattctaagctggggtcctttaagagctgcttaaacgcttccagctacaggaaactcactacttcacaaacacacttcatttgaattttgtactgtgatagttgatagctttctactcagtggaataattttctacctccttaaaacttattggtccttggtcatccttctagagcaggagttggaacatttttcttaaagggcgaaatggtaaatattttcagctttgcaggtgtgatctttgtctcagctactcaactctgtcatggcagtgtggaagcaatacttcaacaaacagacatggctgtattccattgaaacgttatttataaaactaggtggctggctcatgagctgtagcttggtgactctcattttagacctgtgtaatctaggtcctgaaaatgaattactcaaactcttaattccaggtgggttccctgacatataaggggcacttgctctccctttgtataggcttgatgagtgaactaagaaagtctatctaatgccattcaactaatcttatcaaagtttttaaagtcctagtagaaatgcatttgtaactggaattatctgtggttctaaatacgtacctcatgttattatggagttcaacataggttttttttttttttttttgctttttagaaggaggtcattttaatgctatataatttgttgtgtgtgccagaaagccataacttcaggaaggtgcttttagtgttccatcattgagctttctgggatgggaggtggcaatctggaggtgagaaagatacaggtgaacaaaaatctttgccctaaaagtgtagactatttttatggttctgaatacagccctcctttcagatccgtggattataatttagatatcagcacagaatagctatctgaagcattgctcatgtgttttcccccttttctcttggctcttctgtagggctgtggtagtgccagcttattatctgctgggcataataaacacctacacctagcctccagggatcaagaaactgggtcagccaggagtcagcctatcatgctgcagaagctggtaatattaagcccagaaccagcctcattttaagattttacattatataatggtaagagcaatgctgatgttaaaaaaaaaatactggttggagtccaaagtaattttagacattaaagaaaggtttcagaacattttaagtaatgtttattaaagctagccctgacctcaatcaagcacctgctacttaattgatcaaatggtcactggtaagccctgtctcttctaaagtgacttcgccccaagtcatccactgacctttgctcagcactttctccagagacgagagagtgcacaagaggaaatgaaaaaacagatttggtgggaattgttgttcctggttgaaatgaaatgtatgtatccctgctacccaaatgtggtctgtggaccagcagcagctgccccactagggagcgtgtcagaaatgcagcatcccaggcacctttagattagaaacctgcatttacaagacccctaggtgattcataggcacagtaaggttcgagaagcactgatccaacccacagccctccttctgcacagcggtaacccagcagggccatctttgtttcagaagcacccatattacaaagagcttgagttattctggggaggtaaggtaaaggagagaagtcatacttcaatggcagtgagactttgcctagaaatctacaaaataacattactctgagtgctagaactgtaagtacttccatcactctgctatacagccttttctaaataagcattaaaggatataggttttcgtctaacatcaattttttttgatatgttgtgctttctatttgcattcagctcaaaatatttttaaaattcccctcgtgatttcttctttgacctgtggattatttagaagtatgctgtttaatttcgaaatatttggggatttactgatttctagtttaattccgttgtaatgagagaacactgtatgatatcaatcatttttaattttggtcttattttagggccataatatggttgatcttggtggatgcttcctgtgcccttcaaaagaatatgtgttctgttgttattgggtagagtgttcaataaatggcggttaggtcaagttagttgatagtgttgttctttattgtctttttttctttctttctttttgaaacagagtcttcatgtgtcatccaggctgcagtgcagtggtgcaatcacagctcactgcagcctctccctcctgggctcaagcgatcctcccatctcagcctcccgagtagctgggactacaggcacgtgccaccatgcctaatttttgtgtctttggaaagatcaggtctctccatgttgcctaggtctcaaactcctgagctcaagcgatctgccctcctcggcttcccaaagcgctgggattagaggcatgagccaccacgcccagcccaaatctttactggctttctttgtacttgctctatcaattactggatgttgaaatctccaactataattaaggatttgtctacttcttttttcagttctgtcatttatttttccccttcctgtgttttgaagccctgttcctgggaaatccacatttaggactgttatgtctctggatgaacttgattattctctttgtccttgataatagtctttgttcagtagtcatctttgtctgaaattaatatgaccactctagctttcttttcatttgtgtgcacacggcataatgttctaaccttttttgttgttgttgtttgtttgtttgagacagagtctcgctctattgcccaggctggagtgcagtggtgcgatctcggctcactgcaagctccgccccccaggttcaagccattctcctacctcagccccctgagtagctgggattacaggcacttgccaccacgcccggctaatttttttgtatttttagtagagaccgggtttcaccgtgttctccaggatgatctccatctcatgacctcgtgatctgcctgccttggcctcccaaagtgctgggattacaggcgtgagccaccgcgcccggactaattttctaacctttttaacttttaacttatctgtgtctttagtctttatatataaagtgggtttctcataaataacatagagttaggtcttgtttatttcttgaagcaacctaacaatttctgccttttaattggtgtgtttagaatatttacatttaatgtgattattgatgtgtctgggtgtaaatctaccatcttgctatttgttttctatttgtcccatctgttctttgttcccttcccccctttttctgccttcttttggattgtgtattttttgtgattttattttatttccactactggtttagacctttatgttttatttatttttagtagttgctctaaggtttatagtatatgtgcttaacttaccacagtctgtttttaaatattttaccacttcacgtagaatgtaagaattttacaacagtatacttcaatttccttcttctgttctttgtactattgttttcatatattttatttctgtttatgttacaaagcccataataccctgttagtgtttgcatcaagcagtcaatcacgttttaaataaattaaaaatgagaaaaagtctcttacgtatacccacctatttaccatttctcacactctttattcctttttgtagatcaacatttttttttaatctagaatcatgttccttctgcttgaagaacttctgttaacttttcatgtaatacttgtctactggtgataaatcccctcagcttttatttatctgaaaaaattctctatctgtgttgtggaaagatattcactgggtctataatttgagattgacagtatttatttcccttgcagcactttatagacagtgttttactgacttctaccctggatggcctgatgacatcttggttcctttgtacataaattgtcttctgttatatggctgatttttaagattttctctttatcactggttttcagaaatggttttatcatgtgccttggtgttgttttatttaggtttcttctgcttgaggctctttgagtttctatctgtgagtttatagttttatttaaattcagaaaaatttggtcattacttcttcaagtcactttttggctttcctctttcgtcacctccttctgggtttcaaattacccataggctggacttctttatatctcacgcttcagtgttttgttttgttttgtttcctctctgtgttgtctcatttgggcaagtttctattgctaagacatcaagttcactaatattttctttttcagtatctaaactgctgttaataccatctaatgcatttttcatttgactaaaagtttcatttacttattttgtgtgtctttcatgtatttccttctcatgctcatgcttttctttgtattcttgagcatatatttatgatttataataccaattgtaaggtcctttccttagtcattctatcacctctgttatttctgagtctgtttttatggattgatttttcttttagttatgagttattttcctacatcttcaaatgctcactaatttttgagcatgcaaagatgctgtgtgctggattttgttatattcctttttaaaaagtgagcacgcaaagatgctgtgtgctggattttgttatattcctttttaaaaagttagattttattcttctgtgcaacgaagtaacttgcagatcaatttgatccttttgaactttgctttcaagctttgttatggtggattcagacaggcctttattttaggattaatttatcccctcctaagacacattcttttaagaactctacctaatactccatatattatgaggtgactacattctggttctccagcacgcaaactttccccagccttgtgtaaactggtaattttttttcctgctgctttcccatagttctttccttgccttggaggttttctttgtacacaagcagttcagaactcagccaaaggttagagaagacccctctgtagatctttggagcgctctctctatgtagcactctcttttccagtatttagccctgaaaatttagatgccttggccttcccaaactccaatctctgtcttctaaactcaatgagattgttggaccctatttggtagccctctccctgggctgccacgtaaacatataagtatccttccatttgtaaaatacatagcatagtgtgttagtttcctaaatccgccacaagtggatgactttaaacaacaaagtttattctctcatagttcaggaggctagaagtctgaaaccaaggtgtcagcaggcagtgctccccctgaagactctaggaaggattttgttcatgcctttctctgagcttctggtgttgctggcaatccttgtcttgtagaagcatcacttccatctctacctcggccatcataggacattctccctatgcctgcttatgtgtctctttttcttcccttatgaggacattagtcagattggattaagggcccaccctactccagtatgacctcatcttaattatatcaacaaggatgctatttccaaataatgtcacattctgaggttctgggaaggacgtgaattttggggggacactattcaacctagtacctatggcaactgtgagtcccaaagttgctttgatcccttgataaggaaattctttatgctgagataagactagtttcagatatgctgcctgcatcatttccagactgctctccctacgtctctgcaccctacctggtaatctgtgagtgttctttcataattatacaatgtatccacagcttcatcttcatagatcaggaatgcccatttccttgcaggttccctgtctattcctgaacttcagggcagtgagaaaattccatcttgtgtgccactgaatgcccttcgtagcttcagtcataactgttcatcatcactctctcaccctgctaaaatgcccactctgaaagtttgtctatttcagaatcttgcctctaattatcttcacaagtttcctttgtgatgcactgccctagaagtggctcattttccatatcaaagttctgcagatgagaaacagaattatagtagattactcttgctagtagagaagaatgcccctgcatggggaagatgccaatcaaacataacattttccgcaaacgttttgcatattgccttatgttatagtccagcttctttctggaaagatgacagtccatacgggccccagcatctttgtgaattcgtactgagaatgtgaattcgcagattgagtagccaccagacttagacaagtgatctcccagctatccaggcaaggagctggataaagagatgatgatggtcaccaaggtcagaaataactggcagaatcaggaatagattcagtgagttttggctcacaactcaccaccaggcattttttttcaagacaaagaaatccatctgggtttctgttgggtccttgcaggacctgactagatttgtgtttggaaaattgccataccaacaactacggtttgcaaccaagcctatttaaaacaagatcaacaaaacccctctcttccctacagtgccttgtggtatttgagtgttaattttgacttcttttgaatagctgtggtggcagtggctaaagggtgaagctttaagatgccttagaggatcagtcatagaaggcggcttgccaagcctgacaccgaagaaaaacgcagcccttgggtccggctgtgcctcgcaattctggcatccagtcttttctctgacccaaccacaaaccccttcaccctctctccacccccttccacatgctcacacgcacatgaggtgcagccactgtccccttctctgtgtgctcccttgtccacggatgcatttgtggttggaggggagtcggtgcagccatggtagaatagaggtcctcgtgtaagactaacatgagtggtctatttactcatctgtgctgcccactagaccaagagctcctaagagcagagactgtcttattcttgtttatatcttcaatgtccagcacagtgtctgctcaggacagccattgaattatctcctgaatggttagatggtataaggaaggcttcccttaaagaatatcttgccgctgtcttgggatttgacattcaatgaatcaggagatgattcttgaagtttcatatccgttaagttcctcattaccatatatgtatgtatgtatgcttgatactagtaatatcatcaatcttaccaggaacgtggtgtccccaggaaggtcatacattgccacagaatctggccaaatggttccttgagcagttccacgtggaggggacgtctgtgcacatgagtagataaaaaatgcaagcaatgttgttgaaagttagaactcagcttttttccccttgaggtcctcggccaccactcagctgctgaaatccagaacactttggttctagtcctggttctgacatgaatgccctggtgaccttcgattcacttaacctttccagaccctagttttgcctcatcag

SEQ ID NO: 962 - DNA, 32742 bp, Homo sapiens
  source 1..32742: mol_type = other DNA
ataatctccgctcccagactactccgttcctccggatttcgatccccctttttctatctgtcaatcagcgccgcctttgaactgaaaagctctcagtctaacttcaactcactcaaatccgagcggcacgagcacctcctgtatcttcggcttccccccccctttgctctttatatctgacttcttgttgttgttggtgttttttttttttttaccccccttttttatttattatttttttgcacattgatcggatccttgggaacgagagaaaaaagaaacccaaactcacgcgtgcagaagatctccccccccttcccctcccctcctccctcttttcccctccccaggagaaaaagacccccaagcagaaaaaagttcaccttggactcgtctttttcttgcaatattttttgggggggcaaaactttttgggggtgattttttttggcttttcttcctccttcatttttcttccaaaattgctgctggtgggtgaaaaaaaaatgccgcagctgaacggcggtggaggggatgacctaggcgccaacgacgaactgatttccttcaaagacgagggcgaacaggaggagaagagctccgaaaactcctcggcagagagggatttagctgatgtcaaatcgtctctagtcaatgaatcagaaacgaatcaaaacagctcctccgattccgaggtaggaaaagcccctcgggctggtggggttttttatctgtttcctgggcttggcaaatgttgctgaaaggggagaaatcggggctgggggcggcggcggggcccggcgggcggcgtgtgcgtacggtgccaccattgcaaaaacttgtaaccctgtttttttctacccccccctcgacctcgccgattctttttctcccccttctcccccttctgcgtggcgtttgcccctcgccctccccacctccacccctctgggaaggcggaaagacggcctccgcctcgctccgaaagtttccgagacaaatcccgggaaagtttggaagaaggtgagtacgccccgcgcgccccgcagccgcccggagccgccccccgggccggccgccccgcgcgccccggccccgcgcccggctcggcctggccctgcgccggcccggtcggggcgcccggcccctcggggcactttctaaaaagtttctcctcactctctcccgctccgcgcggccgccgctgtcccctcgccgccccgccatgttagcggccaagaggcaagatggagggctctttaaggggccaccgtatcccggctaccccttcatcatgatccccgacctgacgagcccctacctccccaacggatcgctctcgcccaccgcccgaaccgtaagtgcctccgcgcccggcccccgcccgctgcccgcccgcccgcgccgcccgccgggccccgcatgcggcccctgccctgccccctccccgcctccccctccccgcctcctcccctccctccctcccctcccccgctcgtggcccaggaggcccgaaactctccaaacttttctgccttttgtggactggatttgtttgcacttcgccacgttcttgctttcagtttgctgcctcgtgatgttggggagacctctctgtccaagcagggctttgttggtggggaggggggggaatccgaagaactttcctttgcgttctggttccccctccccctttggtggtggtgtttgtttcttcaccctgggaagatgactctgtggctcttcctttgctctctctccctctctctccttctcttccttccctcttctgtggcgtcttgggctttccccggttaaccccttggctgccgctgcgggccacgagtgactgactgtgctgcgcccgatgcgcggggtagagagtgggtttcctccaggcattggacttgagaactggctagcgcgcagagcccggggccctggagaggctccttggctttctcttttgggcgactatgtatttagctttctagtggagattgctggctctcggccctccttcccccttcccctggaaggtcacacttcccagattggtcccaccgcaaacttgggggctctgaggcgtccttttctttggcaacccgcagggccgcgagcgccctgggcgccgtggcgggctccgctgcccggcgcactggctgcgggctctcccgggccgcgcagggcagcagggctgagtggggcggggaggcccctgcggcccggattcttggtttgtgtgcagccggaatggactcctccaagcggacttgtgtatttctagggaattttggcgccttgggatgtatggcggggtcggcgctcgccagcttccgtgtaggcccgtcgtgggccccaggggggccagagaccagggtgtgcgggctcaaggaggtgcgggggccgagggaggctggggcgcctctccttcaagggagtgggccgccgatcgccggccacccaactttgggggccccagggcagcgcggggtgccgggctcggggggcgcttcctgcagggtcggtcccgcgcccaaccctgacatttgttaatacggctcatcccctcccccaccggcctgtgccccctgccctcaccctgaaccccctcctcctcatccctccctccctcttctaagaagcctggattacgaatccctggacgcaagacgcatttgtgcccggcttcccggtattgtcattttacaccttctccagtttggtcccctaccccttatttacacacacgacttttgttttttctttttcggtaactctagatagcaatttgaaataatgcacccactgttcagcagccatggattcggtgctaatggccgagggcttgccggacgggagtcgatcagatctacaagtgtttttaagcattaaaatattaactatcaggtttgacttgcttttttgggccctggcaaaatggcaagggcatgctagaccggtcattttttttatggctagggaagagaaataattattccccccctgcccggcgcccagacatgcttgggaagctgggagagcggttcggctcaacccccttctccagggccagttccaccaggctgcaggggccgcgctctgggcttgcagctgtaggggaagcacagttcgcttactttgtatttttcttgggagcttgtggggcatcttaaacgggaccgttcggctcagaatcgcagtgttcgcctaccaataaaccggaccaagcaacattccaaagaatccctgagaatttctgcctctcctcccctcccccttccgatggaaacctccctggtattattttaaaatccacttaaccatctgaatattgagctttgatggcgggcttgctagctttcttgactctttttaaactcgctgtctgatactggcaatcttgccatcccttctcaaacttgagcagttgtgttgtcttgtaattagcaaacagggaaattgctaaaggcaaataaatgatttcccggtgagaaaaggaaggctcccaatgatcggtcccttttgtgggcattataggaatagacggcgtctagttattttaattgtggacatagcgggtggcctggtgctgtgacatcagattgagtctcagaacacatttctgaactcagtaggcagttttagtacttacatgtcaaacaccagcagacatctttgtgtacactgccccttcgtccttcctccctgttacctgggttagattatgtgctccaaaattaaagttatttatttaggctggtcagcagagcagtggaaatgaggatggtaggctgttgtgtgtcattcctgacgtcttcaatcagaaggccagcttgcaatccagatttgatacagctgcgggaggaatggaggaatgcataggcaagatagcgggcttcccatactcttctgaaatccttagtgttttatagggtgtgtttttaatggcaaggtgtaaagacaaatttcgctgtatgctttattattttccctttgctccttggtggcggtgatttttgctacattttctgttacttatggtgtacctgtaagcagctgcatcctttaaaaagcaaactctctggaaccctgatttctgcttttttatttaagaatgtaaagaattagagagtatcattaaatcggcttatgatgaataatacattatctcaagaataatgctttaattgctgaagacaccataaagcttgatagtaataattttattttaaaatgacaaagatttctgcataatattaatttagtctttgattcagtaataggaatggcttttaaaaagacagattcagatacaaaactgcattaaggagaggtctagttaagtagatgggaagtgttagaactgcaaatattagaactgtggtaacatttgtatattaaagataagaatactgtaacctattaaagttgattggaaaaagtagttttacatttctttttccctcctggcaaagtggaaataggaatatggtggttgaaattccagttaggtttgaaatttctttttaaggacttgattattcgagcccttgcatcttctcttatccaaagttatttgcttttcaaccgagctctttgctactaggttgaacagataaataagctgcatcttgaattcatttttgaacttggaatccagcatttaaaggaaaccgagaggggcctattcattgggattttatttagccgggcaacttctctttctggcttgtgaaaaatggacgttttttcctcactgaaacaacataatcctttctaatacaaaagatttagaccttggagtgtgaagggttaatggtggtccttcccagttgtcctcccacccccccacctcacccctgattgttttgacaacacttttcaaagtgtgacattccaagcccctacataacaatgtaatattactgtaattacacaggtcattacattttaaatagagaacaataaaatgcttatcgccctgaaaaagaacaggtgttcttacccttctttggtatttatgctaattgtttttcatctccttcagaaatatttatggcgaacatgtttagatttcaatctcaatgcaaccgtattaattccatgctaatctttataggttggggtttaatgtctgcagtatggattataggctcaacattcacccaataagtcatattttaatgattataaattaaatatgccagcgctttccactttgttgatattgaaactttctgaaatcccagaaacaaactcaggcatttgggagcctaacgagcttatctggaagacgtgtttttggaaacttttgactgtttaagggaaggagctttgactgatgccctctgtgtctgattgagaaagagttttttgaggaaaacaatcctcgttcttgctaggagttcttcaccttgattttaattttactgatagggatttcatttagagtcattgctggaagttggtcagctttctgtttcttagcaagctgtgaaaaagttaccggaaggtttccaggggcttgcagatcaagaatgctgttctgtttgccgtgctggatcgctgcagttctgcacgccattgaaaaaaatatttgctttagaaaactagcattttaatagttgcaccagaggctgtgcttttaaagattacagtagaagtctttccaggtttcgaatgcctccttacatcccacgaggtgcccctggctgtgtgcaaaaagtgcctagatttctcggtggagaaatcctggtgcaacttctcttacacacgtgcagtgggtaaactagaaggtatctaagaggattttacattttgtcagatgtttcacaacaggcccccctgaatcacattaaaaatgcactgtagagaaaggacagctgcaaatttttgtgtggacgcgtgtttctggaccatgactaaaactccgaggacctttcccccagctgtctggaagttatgtggaagttggtttattggcagttaagtatgagacaacctggatttagcaaatgctctctcctgcacaggaagtagatgacattatattgggggaagggaggagatttcaggcaaggagtgatttacctttttttttttttttttttttttaaatgctggagttgccaaataaataagcactttccagggaagtaagtgtaagctttttagtcttggtgagtggcattagataatatctttgactgcatttataattcttttgaggtgacacattttaaagtttggaaaaggaggctgaaccaaattcttgagggtcttattttcaaaggggtgtgtgatgtgggcatctgagtttcttctgggagtgaatattggcaactatgtaagtaaatcttcaactctgacttataattgagcacatttgtgaaggaaatggttaattttacaaccaaaggcaaactcgcacctcgacaggtctgctgaaagaaatgtgccccagtctttttgctggcaagcgcaccaccaggtcataaatccacaggctttatttacagcccataacacttatgaatgttaagatatttgacgccacgttggccttataatattcaaggtccgcagacattggcagtagctcagatttctctcactaattataagcaatgagatggggggaggtggtggtatcctaatgcaaatgctgccctcccttctccgctgacccccacctctacaatcttgagtttactgagacagacgccaccactcctttggcagctgacttgtacgtttcctctaggctattgttatacacatttataaagagcactttcaggaatggaaattcagtgggggctctgcacagatgcctttttcaaaagcaaagttgctctaggtgtttgcatcttttcccttttcttttctccctttttcctttctttctcttttcttaattccccccaacacccccaccttttttttttttttttttttttttttgagattacattgcctatattgtgcattttccccaggaatacttaaagaaacctggtatgggagacggctctttaatttatatgatgttcccctgagtggaagggaaaatgtacacattacatagtacactagttaaactagttaacgtgagagtttttaaaaaagtgagatgaggtgaagagagttgactaaaagaatataataggtgaggggaaaaaaaatccaggtttacactggggatgggagggctgcttatttgtgaaaaatgtactggtatctgcgggaggaggcacagaaaagtagccagaggagacagaataaatgcctaagaaagataagaaaagtataatacaagagaacaaagatttgggtttgggggaattgaaattggagattggaagtttccttatggaggggcgtgggagtaccctgggctgggctattaaaaagggatattgctttgctcagcaaagatgggctgcgatcccttcattacccagggtgttctacctagccacagatgtgtttcctatcagttactgtgtaagcatctgagggtgaggcattatctgtggtggagactggagtgtgagagagaaggccagttgtcctgctgattttaatttatgttgaaaaagtgggctgttctggtgtattacaaactgactacgcggtataaggaggaagtgagattcaaaggtgtttgccaggccaggagagatgatggctctcatttctgactggatccttccttccatccaacccaaacttaaagacccaggccgaaaggttttcttttctaatcaatggcatgcagaaacttactagccctcagggatagatatgaatccctaaacagctcattacaaagaaggggctgtgggatctttgaacgggttatcagccgaggtgttctttgcttttcccaagataggttttttctccttaggcacatctgatttcgggctagtaattcgacctgttatattttattctttttgtcatgcagtagccccaaccaggtcggtctacggaggaaggaatggccaggagtggcatcagccctgaaggagttaaaattgctccctaaagtttggcatcatgaaaataaatttgaggcctggtaggcattagcagggcacagcacatttacagagcttaattagtacgcactgtaattgttcatggtctgccagaagaagtaatgttcaggaaaagtggagtccctctcttgcagtcttcagcttgaaaccgataaatcacttgcatatttgtgtagtgattcaaatggagctaagacctctcccatcccaacatgtggtaaattgtaaagtcaatgaattgcagatgtaggctacagtgagattctctaagaaaatgcagaatgaatgggaaagagtgacgctataaatatttactgagaagataactagattccttcgtgctgggccaattatgatgtactaaaatatattagtaaaatgcttaaaaaattgagaggatttgtgtgggtctttgggtgggttggtttgttttggaaagtgaaataaaaggcactatgttgttgtcgtgtcagttttattaagcctgaatcacaatggcatacccagggaaggacacatgaaacccacattaatgcaaattaattcgttatgagttgcagcactgcgactgctaagtggagtaatgatggggcatcattttaagagttttagtgtagcaacttttaatgaaaaatgctgtgttaggaacatgtctcagcacttcagcccacgtgtttttctatatgctagaaatatgttttgtacaagagcaggaaacttgattcactttattttttcccccagacagtttaagagctttaattatgttttgacgttgaaagaaaatcatctagtttttctcaaaaatcaacccagaaatgcccatcaccataaagaagttcaagctcaactttttttttttgcgagactttgcagcacaaagtggagaaacgatgaacatagcatttccccgcagacctacagataaaactttcttgaagcgactttttcccctttttttcttcttagagaattttggtctcaggcaatgttgcaagtcaatacttctttccccaaatgtgagtaggtggatacgtatagaagctgtaaaagttaatgatcgttctctgactcatagctgatggtttcaggttgaggaaaagaaaaattaatgagggtaaatagacatttgatggaacattgagacagtaggagagattgttcttgtgtctaaaggcatgcattttgttgcagcagaatttctgaggcagaatgccaggaagtgaaaggggatgctgtcgttaagttattgtttagggatggtacaaatgttcagtgtctagatctctgcaggaatgtttaagctcaagtaccaggcaatgctggttttgccttttctcttgaagtcagaggccccccttggtactttttataagggcaggcagtcacccaaagtcttggtcaaaagtttatttcccattaaatgtaaaaggctctcaacacaggactgggggcagtggggtaggggaagctgggcttataatggcctgtggttgctcaaatgactaatgacctaagaaaaggtcttaggtatactaaaaaaaagtattttgtttcttaaggtaattacatggaaattagatttcaagtggctcatggtagcagctacagggtagagaggaaagtggaccaaaaaaactaacacctcctaggaaatgatctgtttttttttttaatatagataagagaaagccaggtgattcataaaactgaaaataaagtaaatgttccacctcttcccaatttagcaggacgaataggcatcaaaaattaatgtgcatcatgttagaagttagcttagtgctggaaaaaccaacagaggatttcaattgttttaattgtctttgaggaggagattcctgtggttgaaaaaagctgtttcccattccatgtctgggtatctctgatgttttgcatatcagaaacatcaaatttagagcccagtagtgattagaaataagatgaagaatctagatatgatgataataagggaaggggttaatcttaaaatgttggtctttacattgctgaagaattttgcaagcctgtgctgagaactgccgagtcttcaccgttcttcctctggacaagtgagggctgaggcatttgtgggtagtagaatgggggatgggcttggtcactgatttttgttgagagcttcatgggaagcaatgaaatggaaaatacgctggagttctcatctggtgactccctgggtactccaggcagggaagtgccattttgaaggtgtgaggcacagccaggtgagagcagccatgtttgccggatgaggaaatgatgtggagtggtcttggagcactcctggtgactggtgcaggacagtcccaagagatgaggcagatgggaacctgtttttttttttttgagatggagtttcgctcttgttttccaggccggagtgcagtggtgcgatcttggctcactgtagcctctgccttcccggctcaagcaattctcctgcctcagcctcccgagtagctgggattataggcgcacaccaccatgctgggctaattttatttttgtatttttagtggagatggtgtttcgccatcttggccaggctggtctggaactcctgtcctcagatgatccggcctcctcggcctcccaaaatgctgggattacaggcgcgagccattgcgcccagcctgggaacctggtttttattttattttattattattttttgagacggagttttgctcttgttgcccaggctggagtgcaatgcctagatctcgctcaccgcaacctccccctcccgggttcaagcgattctcctgcctcagcctccctcatagctgggattacaggaatgcgccaccacgcccggctaatttttgtattttttagtagagacggggtttcaccatgttggtcaggctggtctcgaactcccgacctcaggtgacccccccccccccaacctcggccttccaaagcgctgggattacaggcgtgagccatcgtgcccggccagaacctggtttttaaactcagatgtgccttagtcatcttgtcctggacttcgcagtctcacctcatattccaaagcacacaaatggcctaccatcttttattcttccttctagcttctggagagagaaatgattgttccagtttagaatgccaggagtttactgggtgtttgtattttttatctgtgccttaaaaaaattagattataatgaacaagacatctttatgttttacagggaaggaaaaagcagtgaaagtatgcattttcgaaagaaaagtgtgttgggaaaagagagagagggtggaaacccaaaggagaaataaaaattttaagtccttgttgcagtagctggaggaagtgagcttggaaatctctccagcgcaatggttgctggctgggaagaaagatctgacttagacacagaataagctgcttgtgctgggtgtgtttgtgagctgggtgaggttttctgtgtcgctgggcacgtgagggaagttacgtggctggggggtggggtggggggcattagaagggagtatgggtgtctgtgggcgctcgcgtgtgcgtgtatgtgtgtgtgtgtgtgtgagagagagagagagaaggtaaaattaactttgtcctatatgttggtttctctgctagagtcttaaggaacttgcagctgcatttttattgtttcaattacagcattctctctaggattgttggtgttatttgggtgatgatgaaggcaaggattaagaacagaactggacaagtgaaaattgaatttggattaaccacagtttgattaatttattcataagattgtgactatatgaatttttttcaacaacatatccttagttatcaggtgtccactcaattttaattgacaatataagattcctatggtaaccctgtgtacagattgcctaggggctctgcagggattgtgggaagagaagcttggacaagtttccattaagatctgaatcaggcgattggaaaagaagagaataaaaccaactgaaaagagagggacaagttgttagtgttgcctactctgctttgaaggagaaccctcctcagacaagagctactttctggccaagaattccaggctcgcagagaaacctgtcccaggcacagaagttgttttaacatgatgcagaattgtcacagtaattagtgcaatctccgtttactgactggcagtttttacacaaaggagatagggacaaagggtgcaaagtcatctttgtttttcagcaggtcactttacttatttatttttattttttatttttgagatggagtctcactcttaccgcctaggctggagtgcagcgataaggtcttggctcactgcaacttctgcctcctgggtccaagcaattttcctgcctcagcctcctgagtagctgggactataggcgcccgccaccacgcctggctaatttttgtattcttggtagagacggggtttcaccatgttggccagggtggtctcaaacctctgacctcaggtgatctgcccgcctcagccccccaaagtgctgggattacaggcgtgagccactgcgccctgccagcggttcacttcagatactgcttctgagtatgtgtggggggctgtgtgtgggggacagatcttctgttgttttagggcaatgtggttcattactctcctttgacaggtatagggtttttttcccacctacttcattgtgtctccttttaattttgattaatattctgtttggggcaagcagacttacattatatctatatataaatatatatgtaatgttttctatttgtttatttggaacagataaaatgatctcagagcccactgcatcctaaaatggatatttatagacttagcccatgaacaacatggatttagactattttttttatgggattactacccttgtgtttattttgagttagttcaaaagttcttatgtgattttttccacttttatttattttttaaaactgtgtggactgaattgtttttcttccagggagcaagatacaaattatctggatctgaaactcgcagcctaaattacactttgtgctagtaacacagacgtgttctggtagtagtaatagcacaggagtagtaacggtagtttattataatactacagatccatttttggaaatgcagttgatttgcctgttgcaaggaggggaaatggacatcaatttcacagggtcatctgattcctcattagtagttcctatttggcaaattaaaatgcattttcagataattgttgagatccttcagtgattattgtattgtttataaagtaaatcagcagatggtgtttgttttcccaattgatgggatcccaagattagcaagtattacttgggaagatgagaattgggtgaacaatcttgctcttcctatttcgggatacctgcttcattgatgggtggtctctaggacttcagagggaaaggctgaggatagacttagaccttggggagggtctgagccaatcagtgacttacattcactcagttgccatctaataggtggtcctcccttagaaaattggcggctttctggcagtgtttggccctctctttggggaagtgtggattactagagtgcaggcgacagagatggcctgggatggacagcttagtcatcatgaaagaatgtgtaaggcatcgggtggcccctgaattctgtctgacacatttgttttcccagaaatagaattgcattggagagttggggcccagttattagaaatatggggatggggtgcttgtacttgttgcagtcttgtggcttctcataatcttttctctcctaatccttcctcttgcctacatgttgcaattctgatgactttttgcagcgcacagttcatttttcttcagcatcccgctcagcacactggcttcctttatgtcttaatgggcatccgtctttccttttcatgtcattgattctcactcgtggcccccatcttccctgtatgcttattgaataggtgcttaaaaaacaaaaacaaaaacaaaaacaaaaaaactttaccttagattgttatgatcatcttatccatagcaacaaatgaaagtacacaggtcttgattgaatgccaaggctgcagttcaatctaggaaggtttgtctgctattcataaactgcttaagatgttttcttgtagtttgtgacataagcagaacgctttgatttggtttctttctacagctccattttcagtccggcagcacacattactctgcgtacaaaacgattgaacaccagattgcagttcaggtaggaaacgcaagagattctgaagcttgaattgtctatatgtaggtctcttgtgtgttttattctccgccccttcccccaactgagataatgatgatgatgatgatgatgatgatggtggtggtggtggtggtgatggtggtggtggtggtgatggtggtggtggtgatggtggtggtggtggtggtgggggggggttgaatcactgggggagaaggggagcaaaggagagagaagcaggagaaatgctgctgaaatgatttagagatatggaaagaaagagaaggctgtgcttattgttaagagtttcttgaccgggcataatgggcacacagaccccagcttgactactgtttttctttgcttagggagggatcttgaattgggagtaaaacggggtggcacaatgtgaatgggaaggcttaaggggagaggtgggagaggaggccgtgcaacagccagagggttgtttctggtggatcaaaatcatgttaagtggtgctaagaatatctctttggacctgatcatcctgaaatgttgatttctcttggacctgtctatgtatgacactaaatgtgctggaagggaaaggcgacagatcccagcttctgatgagtgtcctgtttcctgctcacgtagtacttccattctcttaaatccgaaggctaaacaaatcatggactaatatagactcggagctgaactgatgccagcagaatgcagtagaggagggagagcagactaatacgattttcgtctgtctgcctggccttgctgggatggatgtacctcatggtgtaactaatggtaccaaaacttcttgagtgttctggcttaaccctttgaagggattctcttgaaaccgtttgctgtagtgttgaggtctagctggagagccttctttttttgtgagttgatgttggtttgttagatcatttgtgttattccatgacttcttttctgggcaagagcccttgcagataacttgtctgtgtgtgtgtatatgtgtgtgtgtgtgtgtgtgtgtgtgtgtgtgtgtgtgtgtgtgtgtggtcttaggtagctgcagccacaatgcatctttgtagctctgtcatctcagttctgcatcttccttgataagacttccagatagctgtttgccccaggtaaacggaattattccgccagtgaaaagcatgagtcagcagacatttttatttggtgcattcctagtgtttctgtactcattttcaggccacagcaacttattttaaaaatatttgaggctgggtgaggtggctcatgcctgtaatcccagcactttgggaggctgaggcgggcggatcacttgaggtcaggagttcgagaccagcctggccaacatggtgaaaccccatctctactaaaaaatgtaaaagttagctcagtgtggtggtgggtgcctgtaatcccagttaatcaggaggctgaggcaggagaatcacttgaacccgggaggcggaggttgcggtgagccgagatcacgccactgcactccagcctgggtgacaagagtgagactctgtctaaaatatatttatatatatatatatatatatatatattttcttttcttgattacttctgcagttgtgccgccaaccttcttatgtgtgtcttttgggggaaagtgtgactcttgattttacccttctccactcctaactgtttccaagactgacatgtctttaacttgaggctgcaattgttctttttggcatgctgcccatttgtccctccttcttccttttgatggacagcatagtaagtcttgctcccagaaagtgctttaggtgcgggacttggttagagaacaagcccaaaccctaactcctggtgcctgagtggatgtacaactcttggtgaacgggtggatgtaccatgtcgaggcctcctacatctcgggtagtgctggaaaatcttattgcctggggtgtgggaattgttgaggttgaataggatagtgatccttatcttggtgtggaaaggctggctggggccatgtcactgggagactagcccagaccagaccagctgttgtatctttacacccgttgctgaagtgccccttgttaggccgagcagttcgtctttctccaaaccacctggcacggtgcaggccatgtgaagctctttctcaggaggaagatggagtaaattacagagctcattgttttggaggactgaaaccattactattcctccatgaacaggtagtattgttctctgcttctatttgctaaggcttgatgcccatgtgggcaaacagagagacattttattagagacccagcaccatgcttttgcagtgttcattctccctcagtctctgctagacccgcacaaggccaagctaaatggcatctagctgtaattttagtttgatcctcaaaggataaatggaaaaagcaaaaccaaagaagcaaagggaaaagaaggggaaagcttagacgaaatgaaattgttcccaaagtacattggggagctcataatcttttcgctctggatgtggcatagagcagatatgttcctttcgctccattctccaacttaagactaaatgcagcgtgattgtcggggcagaattattgtccctggaaacttaaaactgttcaaccttaataaatactagatttcaatagaagctgagcttgttgctctcctaagctacatcctaaaataacccagagtactatgaccctgtgcatcacattagactcatacgactcatactcttttcccttcccatccctcctgtaatctcaggactcagccaagctcactgtttatatgaatggccttgggtgattctatagacacgtcactttcttataaaaggtttggacacaatagcagttgctatgtttagatctttcctacttttgacagcctcctagctccccttggttttgaaaagacaagagcaactcagatggccacgttctcccaaaatggataacacaaatgaaactagaaagaaaattaaaagttttttttttttttttgagacggagtttcgctctttgttgcccaggctggagtgcaatggcgcgatctcggctcaccgcaacctccgcctcccaggttcaagtgattctcctgcctcagcctcccgagtagctgggattacaggcatgtgccaccacgcccggctatttttgtatttttagtggagatggggtttctccatgttggtcaggctggtctcgaactcccgacctcaggtgatcctcctgcctcggcctcccaaagtgctgggattacaggcgtgagccaccgctcctggccaaaaattaaaagatcttttagaaaagacattgttttaaaattctattgacttttaaaatgttttattgaagtataatatacatgtaacatagtacacagaactttagtagagagtagagaggtggatgaagttttccatatgtgaacgtccatgaaaccattactcagatcaatatatatagaatgaggttgggacacctttactgtcaagggccagacactaaatgttttgggctttttgagccgctcagtctctgttgcaactacatttgatccttgaatggcacaacatgagtttgaaccacatggatccacttagacatggattttcttctgcctctgagacagcaagaccaaccccttctcttccttctcttcctcctcttcctcctcagccaactcatcccaaagacggcaaggatgaagacctttatgatgatccacttccacttaatgaatagtaaatatgttttctttatgattttcctaataacattttctttagcttacactattgtaagaatacagcatataatatatacataaattatatattaattgactgtttatgttatcggtcaggctttcagtcaacagtaggctattagttaagtttttggggagtcaaaaggtatactcgggttttctttttcattttttttgaaacggattctcattctgtcgcccaggctggagtgcagtggcgtgatctcggctcactgcaacctccgcctcccaggatcaagcaattctcctacctcagcctcgctagtagctgggactacgggtacctgccaccacgttcggctcatttttttgtatttttagtagagatggggtttcactgtgttagccaggatggtctcaatctcctgacctcgtgatccggccatttggcctcccaaagtgctgggattataggtgtgagccactgggcctgacctatactcggcttttcagctgtgtgggggttcggtgtccctggcctgggggttcaggggtcaactgtactcagcgcttctattgtggtttgaaagcagtcaatgataaacccaaaggaatatatatatattccttgttgtgtctcagtaaaactttatttagaaaaaaacaggcagtggctgtatttggtcccagaggctaacttctgataaagagctccccagaagtctaccttgtttccccctttttccagttatttggcttcttcctctctcccctgcccccactgaaaagtctgttagttttatttatcactgtggattagttttacctgttttttgacttcatgtaaatggaatcttatagaatgtactgtttcatgtctggccacactcagcatatgtctgtgagtttcatccatgttattttgggtagcaatggtttgctctttttcatggccaagtagtattccactgatgaatatgcttcagtgcatgcatccttcctacgttgttggatatttggagtgcttccagtttttttgcgattatgaataaagttctagtaacattctcccacacatcttttggggaaacatatatttccatttctgtttatacaccaagagtagacttggaggggcatggggtaaatgtgtgtttagtcttgcactgaccttctgagagagacttgagtgctggatttgagtattgtcattgcaacagggccagtagttgttaggtatgtgagtgatacgtgtagggtgagcagtaaatttatctaggtgtgatcagaggccaattgcccaagctccggtgcaggccccttcatgcagtgatttggcctttggccccagctcctaggaactcctcccactgtctccattaacctgggaggaggactagcaggctgaattccagaggtggacccacattgcagatgtgtgtaaacagagctgtctcccaggaatgccctgcaggtgattgtagataatgtttaggcatctctattgccttcatgaagaaagcccttccaacactcctactctcagcattattccaaacctatgagcactgttgtgatgaaggtcgagacccacagaagatgtttcccttggtttttggaagggctacttctgagccaattaagcctttgttttaagagcgttttggccaaaggttaatgttttaacaccaagtcagatgtgatttaggaaaaacctccacatgcagcaaaaacaaactgtgtaaacctttcttggttgttattctttttagatttgaagtggtttgtgtgtgtgtgtgtgtgtgcatgtgcgcgcttgtgcgtccacacaaagacaactaggagaggatccagaagaaatggaccattttatttgtttacacagctgaggagtggatactgtgcagtgggggttactttccctcttgttcttatgcttgcaagttcccatctgagctttaccaaagcctaaccttctgcttggtcttagaactcctccaccatgaatcagtaaggccaccaggaccctcctccagggcctgggtgctttttggagccaaggagagaagaatactaactggagagtgtccttaccccatgttggccacttattcctggatgtgaactggatgttcagtcttgtccgtgtcttaacattgttaagattcctggggtgcgttgacacagagtctatgtctgtgtctgagcagacccttcatactgtgatgagcatggccagaaattagtaccagcggactggcccagcattgaagaatgaggtggcagtgtttgcagggcgcttgactttctcccacttcaggtttttgatgagggtctcttgtgttctgggcctttcctctcacccatcacaagttccctggccttcttgttttcatgaggatttgctctcttggctgagcagcagatccaggctaagtgaagaactcctggaaacaggttcagcccttggtgcagtcacttcctcacgtttcctttagagctgtagcagacttaggctgtgacatttcatgtccattttccacaaaggaatgaagaattagagagagatcatttcactagagtagtttgatagaacctgtggatggcaggtaacttgctcaagaggttcattgacttgctatggtgatgagttttaacctaattagctaatttaagtccatacctcagaagaatgttcattcatgaaaaatatttgcatctaatgtgtgccaggccactggagaattcatcagtgagcaaaacagacaaaaatcccttgctctcaccaagcttaaattctagtgatattttaatattaatttttaatatttaaattctagtgatactgacttataaacaccccgttcccaaactgagttaggtttccagtgtagtccaggagttagattttccttttcttttattttttttgagacagagccttactctgttgtccaggctggagtttttcctctgccttgctctgttgtccaggctggaggtttttcctccgcctcccaggtttcaagcgattcccgtgcctcagccttttgagtagctgggattacaggtgtgcaccaccacacctggctaatttttgtatttttagtaaagacgggggtttcaccatgttggccaggctggtcttgaactcctgacctcagatgatcctcctgccttggcctcccaaagtgctgggattacaggtgtgagccaccacgcccggacaggagttacttttttttttttgagatggaatcttgctctgtcacccagtctggaatgcagtggcgtgatgtcggctcactgcaacctccgcttcccgggttcaagcaattctcccgcctcagcctcctgagtagctgggactacaggtgtgtgccaccacacccagctaagttttgtatttttagtagagacgaggtctcaccatgttggccaggctagtctcaaacttctgacctcaggtgatccatctgctttggcctcccaaagtgctgggattacaggtgtgagccactgggcctggccgtcatttttttctttcctttttttttgaagcggagtctcgctctatttcccaggctggtgtgcagtggtgcgatctcggctcactgcaacctctgcctcctgagttcaagggattctcctgctttagcctcccgctggccgtcatttttaatcagggttgtgattttcaacctattgaagtttgagaattgctgccttagagtcttctgaaaccaatcaattgatcatttattggctgtcccagtcattttcactagccaaataaaaagtgagggctggctaagtactacattgggataatattttcttattttgaatgagaaattggactgcccttatgttccagtgagtttttgaggcctttattttcccattcttatgtgaagacagccagatacttttgcaaagcttgagaaaaagcatttgtttatggaagagtagcttggacaataaggtgcttagactttggggtcagaggcaataacagtagttagtaataatagctgcttatgcttattgaattctcttgagggatccagtgttaaatgctttttgtgaattattattactattttgagacagggtctcactctgtcacccaggctggagcacagtggtgtgatcatagctcactgcagcctcgacctccctggactaaggtgattctcccacctcagcctcttgagtagctgggactacaggtatgcatcaccacacctggctaatttttgcatttttagtggagatggggcttcgccatgttgcccaggctggtctctaactcctgagctcaagctctccgcctgccttagcctcccaaagtgctgggattacaggcgtgatccaccgcgcccagcatatgtgaattctttattgattcttcataacaacacagagggaaatttgaaaggtgtagttactggtattatcaccattatcctcattttgtaaatgaggaaacagatacctgagatattttgcccaaggccaattaggattcaaacccagacagtgtgactagagagagattgtcctacataggcttatggtaactattgcctgctcaaagtaatgctcacagtggtctaggggttcccttacagcagtggctaccaaccagccttctgggcaacacacatagaaatcacgtgggacctggtaaaaagtacagaatcctgggttctactccttggagattctcatttagggattaggtcagtgtttcacaagctcaagtatcacctggagggcacccggagagcagactgggaatccacccccagggtgtcaggttctgtaagcttggaacgggtcctgacatttgcaagcttttaattaatgctgtgttccttctctggggatagctcttggagaaccaccggactagggcaagggttcccagcttggactgttaggttatactcactcaggaagcatttcaaacaatattcagcccaggccctgccctagaccaaccgagtcagcatctctgggggttgtggcctgtgcatccctgggttgcaaaagcttcccagcttttagtgagcaggccaggttgaggcatctggtctaggggatcctggaatctgctaccacttccccacactggatgattctaatgcacacagtcacactagagaacaactattgtaagccttttttattgtttaattttaattttatttatttatttttgagatggagtctcactctgttacccaggctggagtacagtggtgccatctcggctcactgcaacctctgcctcctgggttcaagctgttcgcctgcctcagcctcccaagtatctgagattacaggttcttgccaccacgccctggctaatttttgtatttttggtagatacggcgtttcaccatgttggccaggctggtcttgaaccctcacctcaagtaatctgcccgccttggcctcccaaagtactgggattataggtgggggccactgcaccctgccaatttttaattgttttgtagagacgggtctcaccttgttgcccaggctgatacagtccattttaataggcaaggaaacaggtgcatggaggtgaatgggttggtcccagttcttaccacttggtggacacgggacaagacaagaatccaggagtccagtgcagctatctttcaacacggctttctttctatctttccaggagaggttatcatcttgtctaagccaatagcaattggattacattggccagataaaataaaacaatctagttttaccgtttttacttatatcattttaaaacttatatctgttttaattatatcattgtatttgtacgagttgagatatttgtatctgttcattctccaccatattagggcacttagttcggaagagggctggtgaggataccaagacaatgtctggtagtctttaactggaactaccagaaagaaaaaaacaactgtcgtatcagccatacgtgtgcctcttatgggccacggcaggtgggcctcgaggtctgacctatggcagtcagctgctggtattttctttttttttgtttttgtttttgagatgagtctcgctctgttgcccaggctggagtgcagtggcgcgatctcggctcactgccacttctgcctcctgagttcaagcaattctctgcctcagcctcccgagtggctgggattacaggtgcctgccaccatgcctggctaatttttttgtatttttagtagagacggggtttcaccatcttgaccaggctggtcttgaactcctgacctcatgatccacccacctcggcctcccaaagtgctgggattacaggcatgaaccaccgcgcccggctgtctgctggtattttcttagcataacttcattttgtaaattctactttataatattattttataaagtccctgaaaatcatgggattgtttagctgagcacagaaatttctaaatgggttgtgaccaacatttacaggcttatcaggcttagtagttaatttgtttcttgagtttgatttggttgcatggtatcaaatcctgatcaaacagataagtggttgcttctttttttttctttttcttttttttttactggtttgccttgaaatcttagcatccacttcagttaaacagaaatggcattacctgttcccgggggttccaccaaaaccactggttggatggtagtgtgtttaatagttaatgaatactacattgaaatgtaaaaataaagtttaaaagtaggtacgtgtactatattatctctatatttatatgttataaaaagaaacattcacatcaaacatatgtggagtctttgaagcatcttcacaaaatcctagtgttttaaggggtgcagctaggaaaatacttggttataccacattccacccagattgaggctcggtctggaaactggcatgtctgtgtctttggttagtagtaggggctggatgagataggatgacttaatgcaggacttctcagcctcagcactgttgacattttgggctggagaattcttcgttgcaggggaccatcccgtgcattgtagggtgtttatttttaaattttatttatttttatttttatttgagacaagagtctcactctattgcttaggctggagtgcagtgttgcgatcttggatcactgcaacttctgcctcctgggttcaagggattctcatacctcaacctccccagtagctgggattataggcgtgcaccaccatgcttggctaatttttgtattttcagtagagatgaggtttcaccatgttggccaggctgttctcaaactcctgacctcaagtgatccgcccgtctcggcctcccaaagtgctgggattacaggcgtgagccgccatggtcggcctgtagggtgtttatttagcaccattcattgacctcttccctcttgatgccactggcacccaacaaaaatgtgacaactgaaaatatctctagacattgctgcatgtcccctggggatcaaaatcatcccttggttgagaacctctgactcagtctaatagtttaaagcatgcatcctaccattgatattatactatattacctttgcattttaaagaaacaggtacgagtggaggtgaatagttcagttcctgcttctggagtcaggtatatctatctgggtttgagtgtcggctctgctaagcttcagtttcctaaatctgtaaaatggggataatggcagtacctgtttctagagttgggagattaaacaaggtaagatatataatgatctgggcagtacgatgatacagggaagcgtgcttgataaatgtaagctgctatttttaccattgaggattatgaagtacttgtttgcacatttagaatatgctttatcccaacatgcattgtgtattttttatttcctgtcaagagcatcacacatgataaatttgataacttggactatctttgctgtgtaacaaagatttatgactcctattcctgttggttgctgtttgcatttctcttatgtcactgaaaattttttgctgggtccttgttacatttgactagaatataagcacttctgaagggctaagattgtgtcttactcagagattgtgttttactcatatttatatccctgtagcaccatgcactaatttcctgggacatcgtaggtgtacaactaggggtgtgaatgtgtttgaatatctaattgtgggcagaaaggaaacagtatataagtgagattggggtaggtgtatattagaggtaacaaagtgtgcttttagaatttttaaataacagccccttttataatatgaaagaccaaaaataatttgtttttgtgctcagccaggtagtttgagatgagtgttcgaccactttgtcaacttggtgttcttttccacgtatcttagattttgattccagctctccatcagtgcgtgaatttgcactgctgtcttagagactatggcatcatccaaacagtggtaactatggttggactggtgtctatttctatgaccatcttctgattttcagaatgcttagaggttagttggcttttaaaagcaatattaccttttttttttttttttaaatgtcaggcagcattacctgtcagatcataatattttcatacactttgacaattgtcattcattcctgcaggggacttcaaaacaaattttaaacaagatgttttcctaattgtggatggatgagcctgcacagacagattcattcttttctctttccaaacctcgtgcctcccagatttttgaggttgagatgaagcaccagaataaatagctttggttgcaaaccagaaatcttccaaggcttgaaaatggatgtgtgtgatagtagcccattctaggggtactggaagattcttctcactagggctttggtgaggctgccctgtagggaagaagtcttgtgtcaacagtttttaagttgattcagtaagcattgttgatgattgaaattgaagaattgtgaagacaattcatcttgaggaacagagagcatagggtgtgagccaggctgctgggagcagacattgacatacgggccgtcatcaaactaattgttgtttgaattacctgttatgatccgatgacaaatctgccttgctcctgccactggagcagaaaatgtagcttgaactggcgtgatgttagcaagtgtaaactgtacttcaacaagatggataaacccaattatggggcagacctgtagagagaaaatccatttaaatctcataatgttaagcagagctgtgtttaattcatttggaccaatttgggaatgatgtatgagtgttggtgaacattagtcaaagaggggaccacttgggggaaagggatgtgccgatgccgcaggccactcgggggaggcagctggggtgtcgtctcagcagcctgcactaatggcggggaaaggcagcaatgaccaaacgatgtactgcctgctgtcggggagcagcgctgtgtaaataaaccaataaggaaaacatacgaagcagaaaggagaggagttgtttttcctaaatgctattgacagcccaaaacataaaggaaatttgaggttccctttctctatttctaaaccctgaaacccgtatgggctctgctaagccttgtaacaggaggcctagaaaaagctcttgccagaaagcttaatgatgatttgaaagagagaaagaaaaaggacagctaaatttaaattgatatcttggggcatttgattctctattggaaaacagttaagagggattattattttgaaatatatgtcttatgcatatttgaaatggagtctagaaggtcttgtctatttaaaaatctccctctctattttttaatagctactaagtggtgacccagctttgcacatagtgggtgctgaatgtatactgattaggtgaatgaaagcattgaacttgagaggcagttttcagagctagatattggtgttttctgtacctcaaactcattaggatgtataaggacctcatatcctaatttctcatagtagtcttttttggctttcattcccaggaattttgtgattttttttttttttgagacggagtcttgctctgtcacccaggctagagtacagtggtgcgatctcggctcagtgcaagctctgcctcctgggttcatgcgattctcctgcctcagccctcccgagtagctgggactacaggcacctgccaccacgcctggctaatttttttttttttttttttgtatttttagtagagatgaggtttcactgtgttagccaggatggtctcgatctcctgaccttgtgatccacctgtcttggcctcccaaagtgctgggattataggtgtgagccaccgcgcccggccagattttgtgatttttatataataatatatgattccacttcttttaaaatatacatatatatttttattatactttaagttctagggtacatgtgcacaacgtgcaggtttgttacatatgtatacatgtgccatgttggtgtgctgcacccattaacttgtcatttacattaggtatatctcctaatgctatgattccactttttatccctactcctacattgttggttttgccaaggatgttcttagaagactccaaccctcttttatgtggggaggaggtgctaaagccccctagtgagttggtattgttttttttctcttttgatttggggggttttcatctttcatggagtggactggccttggagacttcgcctgttgaaaggagaacttaaaagactggagtgcataaggagcttggcaatggaccgccaagacattcatggttgtgcactcttgcctcagtacccataaatctaatgattggaagtgctgggtgtaagtggaggttaaagccctagaatttgttttctgtaactggggacagttcattgtatgaggtcatggtgcacattgagtgcccattccgggcacatcttttatcccagagtcaaattcgttaggattttataccactttctggcgttctccaagtttcagcttagttgaagaaccagtaaaagaatgacaatagactgggtgcggtggctcatgcctgtaattccagcactttgggaagccgaggcgggcggatcacttgaggtcaggagttcgagatcagcctggccaacctggtgaaatcctgtctctactaaaaatacaaaaaattaggtgggtgtagtggcatgcacctgtaattccggctactggggagctgaggcaggagaattgcttgaactgggaggcggaggttgcagtgagcagagatggcgccactgtactccagcctaggtgacggagcaagaccctgtctcaaaaaaaaataaaaaaaataaaaaaaataaacgaagacctcacagttatgtttcaacactatgaattctgagaatctgaattttctgatctagttaccagtagaatgtacgtaaaatactttgagaaaatttaaattagcatctccaccaaaaagccccagcacatttagcccatgatttgacctgcccaatgggagtcttccaaatcatttaagaacaagtaagtactattaattaaatgaacttggaagaaacatatcaggatgtgcttccaaatctgaaggtatttgtgctgaaagaatcatctgttgtgttccatgagttttatgggggactctgtctggtttggctcaaaagcatttgtcaggtttatactcctgagggtggggtatacacagtgtgaactgggcaggcagtgaataagggaatttctggagaacagacccttaaggaaaagaaagcctccgctttgcgggttagaatggccagtgtatgttgggggcaagtcttttcagggccttctgtggtttttgtcctggtgagcttactgctttctgatgtaatagcaaagctgaaatcttgcagtaatgtgcagagaggaatttttgtcctttggattagcttctaagatataaatatatagcaaaagacccagggctacttaatttgatacagaaatgaaatggtgagttatctagataagggcttgattgatttatgaaatgtatcagactcaattcaggagtgttccgggagtcacgaagttcggaactagattcttacccttaaaatcaaaaacaaacctcccctgcttccctcctcctggtcttaagtcactagtttttattctggaatccagcggcatttgtttcttttttttttttttgaaacggagtctcactctgtcgcccagcctggatggagtgcagtggcacgatcttggctcactgcaagctccgcctcccgggttcatgccgttctcctacctcagcctcccagtagctgggactacaggcatccaccaccacgcccggctaattttttgtatttttagtagagacggggtttcacagtattagccaggatggtctcgatctcttgacctcgtgatccgcccgcctcagcctcccaaagtgctgggattacaggcgtgagccaccattcccggccaaagcatttgtttcttaataattgctgaagaagccaagagtttcctgttaattaaaaagagaaatcactgaagcaatgtataaagacacttttttcttgaaagagaacttaaaggaagatttgaaagtgtccctaagctaagaacattcttaccaaaccaccagtatgttttaggcagcctgctttgctttgtgttttcttgtcacttgttgctgttgctacattttcataatggtgaaagcagatgagaaatgtctcctcacagaagatacgatttgtgaagctgtttctctctgaagaattggcactcagggcttgaatttgagcaagtaaagggcatcaataatgtgatgggcccctttccttggaagagacccgtcctcaaaaaaaaaaaaataaagaaagaaaaaaaggggaaaagctgtgttttgcttgggtgacttttcagcttggttaaatttgccagtttatctctatcagaaaataaatcctaatactcctgacatgattttgtcattttaggatcgtttaggaaaagcatcaagttagtttttgctgattgggttggtacctccgccatccttaactgtttatttaatagtcataaattgagagtttggtgtttcctaccaccaccctctttggaatttttggtcaagatcatctccagccaccaagtttgcatagcagtgaaaggagcccgacaatgacttaaatgtgacgggaaccaatgatgtgacttgtaaaaagtacacagagaaaaccacatgccacatgcaaagcagatatggttttgatttcggcctcagtggttctcttatcgtttctttcgccctgagagtggatttttatctttcgatctgacttctgttttggtcatggtttgtggtttccttttgccatcacagctcttacatttggctgcatgggaaccaaagtgaccaggactcctggtcggtggaagtctcaggcaaggcagccccagcatgccagcccccaggaatattgagactgctgtggcttcagaattattgctcctgtcctgctaactcacaggctccccacctggggattcttatccctctgtctttgcttcttatgtaatacgtctgtggactattttggaaacatctagatgaacttgtgatcgatcttcccattctatgtatttctcctggttccctgcttttctatcatctcctttgggagggaatatttttcctcattaactagtttccaggtcaaaatttctccatgaagtatgaacttttctctatcccagtatttaatttccaccacttttttttttaaaaaataacataaggctgaaactttttaattgggcaggttacttaattgctatgtggctctattttctcatctgtgaaaagcaggtttactgagaagactggcctatcacggggattcatgtgaggctctgtcacaggggcctagtccagtacctggcacataagaaaggtttattgggtttatgactattcccagtggggtgtttctgggcaaactgggatagctgatcaccctaacacagttgttattaaaactcttgccaagcttacaagtggtgatatattgtggcgcatatctctttttttccccgcttgcttagtacctcatagcggaatctggacttgagttatttctcctgaataagagtagtccagaataccctttatttttgttttcttctttgagatggagtctcactctgttgcccagactggagtgcagtggtgcgatcttggctcattgcagcctccatccacctcccggattcaaacaattctcctgcctcagcctcccgagtagctgggactacaggcacgcactaccacgcccggctaatttttgtatttttagtagagacagggttttgccatgttggcctggctgctcttgaactcctgacctcaagtgatctgcccaccttggcctcccaaagtgctgggattacaggtgtgagccactgcccctggccccagaataccctttgaagagagttagggtgaaagagtccatgttgtgatatcatttgtctccccatgg

SEQ ID NO: 963 - DNA, 32742 bp, Homo sapiens
  source 1..32742: mol_type = other DNA
gggaacaaacttcagaaggaggagagacaccgggcccagggcaccctcgcgggcggacccaaccagtgagggcctgcagccggccggccaggtatgtcacccaggggttagctggaagctggctagcagtgaggacgggggatggaagaaaggagagggtcccaggatgcctggcagccttttccctcccaagttaaacgggataagactgggacagcggagggagtgggcacggaggttggagtctggagcttcttcagcgcactcccaatccttgatcctcccgggaagcctgttagctaggctaggctgaggttggccctacttcgcctaaaaatcctcctactcctggcagacgatgcaggtgtaaaggatgaggcctggggagggggcctgaggatgcaggcatcgaatctcatcgcatctcatgcccttctcctgggtttgtgcagggcagcggcaggcgcggcccggacctacgggaggaagccccgagccctcggcgggctgcgagcgactccccggcgatgcctcacaactccatcagatctggtaagaacgcggtgtggtcaggatccccgagcccccgcgccgctgagcgtccgtgcgtgcgctcgggtggttggatctcgagagcgtcagcacgggattcgcgggacccacccgcgtggggacccagctggggcgcctggggcctggccctccgctggagccgcctcgctgttctcgggcactggggttccacccggccagctgagccgcccttgcccggtttcgagggaccacatggatcggtgaggggatctctgtggagttagagggggtttcctttgagctccattcccagccttgcatggcgcattagtgtggacattcttcgtgctctgtccctgggctgcaccggtgctggacttgccgtttccccgtccccgacctctaagtcctcttcctcgggtgcgcgcagtccttcccagtgactcccctggctggactgtgagctccccgcatctctcaagccaacggcaatggagccggtggtcccgggcccgggagccggcagcgcactcaggtgctctccgactcctcctggcccagcaccgggcaggccgggcgccgcgcgcggggcgtccggctggtgaggactaagccgctcgcggagtcaaaaccccctccccacctgcgcccggaagcagggccttcaaacacactcgagctcccaggccgcgatgcctgttttcccccttcccggccagggctgggcagggtctttgctgggaaggagctccagggtcagggctggtgggcgcagccgtcccggcgcgcagcgagtgcggacagcggtggaggcgcagcgcggcccgcagtgatggatggagcccggccggccgcagagaaggcgatttatggggccagggcgcatcgctatcgatttgggccggcgaagtgagaggaaatcaatatttcagaatgaattctccgcgaatatgatgtcccgctctgcaaacgggacatttgttataataaggagggtcggatcgggcgcgcagcgaggctgagatctctatttagccaagcgcactgcgggggcccgggctctgcggcgcagtctccagtcccagggccatggcccaactaggaggggagcgggaaccccctggggcgccggaagatttctcactcgggttctctctagagctgcagacgaatgctccctcccggcccccattcccctcagagacctgggccagaatcgtccggctgcccccagaaggcgcggggtcccttcaaggtcctcaggggagagacctcgcagccattccccggcgcggcggggttggggagccctgggaccgagcagagctccctggcacctctttacggtccgcgtcctggaaccacgagcgctcctaggccactatctaaggtcaggatcaggttttagtcccttaatctttagccaaaccgtggtacgataccagacatcgccaggaccatccctgaggcctaatgtgcagtgcccggtgcccatgccaagctggtgcaatggcacttctgcgccaagctggtgcaatggcacttctgctcggctctggaggtccatctttcctcctaaccttcccctgacccttccggcggtggcaggaggagtgagtgctctcggaaatcaaattcactgtggccgggctggacccttactctctgccgctgcccaagaaatgagacgatgtccccgtccctcagatgagctttttttttttttcgcggctacttattttcattctagaagtactcgttagaatagatggaaatagagtatggaaagaataaataaaggcacaatttatttttactgtagttttaatcaggaacagtcccagatgatgagatgcgcgctttcccactagcttggatgcaaatcgcgcttgggttttgggagggagccctctgcccctggacctaccaggtaatttttttcccctttcttcttttcgggaagacagaggggcttcttctaccctctttccaaaacaaatagacaaagtggcgagggagggaagatgagactttcttctcatagtttaatttaaacgctaataaaacaagaaaatggcctataaccgcatagactgctgaaggcgctccctgtttcttttctgaaccctccctcggcaaacctgagggagaggccgtctgtctttctgatcagcttacctgacactgttgtctataaccggagctaaactcataagcggacccctctggtttttacaagcccattatctctcgggttttagcaggttcccccttttccccaggcacctctgttcctgagaccggccgtgcttagggagctccccttgagttttctgtgagcagagcccgggacgcaggcggccacacggctttccgcgggagcgaggccgagcgcacccttcccaataaccggggacgctcgagaaaacctccccgcgcggcctccgccgcccagcctgccacggggtcgcctcgtcgttggctggtcttgccttgcagagagtcttaacgttgtctttcctacagctttattctgcaggaatgttgaacgcgaatcattttaacgtgcgcaggtcagcgatgggctgaacgttccttaaaatcgctatttttgttgcatcagggacgaaattctctaaagcaaaaacatttttaaaaaaattcaaagatgcagaagaaacgataaatgccccatatatataaaagtgaaaacaatactgtaccaatgaggaagagagttttgtaaaagcaagcaggctggctgtcattaaaagttatcttaaataacttgtcgcagcccactcccaccagtcccgaaaatagttcattcaagtggtaaaataagacaaggcagaggacgatgtctctaacttccctgatgtgagatctaaagccccattcctaactcttggttttagaattgaggaaagtggaataaatgcatttggaaaggatctgttttcttcccaggtttcctgcctgggttgaaaataaggtttcaggggatggaagcaactttgaggaacataaagaggtattggggttcatcaattcatctttgtttcaagatggttcccccccaccctccacaatgcaagttaattaggagataatttagctaccttgtgaattagttttaagataagtatctttttaagctttgtcactttaattgccccactgattgataagaagtaattatttctaattgacacttttttgatgtctattggaagcatttatttggaactttttgggggtggaaggaaagttaattaattttatcagtctacccccaaaaggactctgcctaattttgttgaagaagacaaaggaagtgaaggaaaccaaataaaaaatcaatctcatggaattttaattactaagggacactttggtttaaattagagggcatctactaatataatatgtcaaaacgttctatttatggcctcaaatctctaatttattgagatgcattttataggtattcattttcctatggatacactcaacggccctttatatgcttccttcattttggagcaggttcctctgctgtgtaaataatttttgtgaaaagtaaaatctgtcaaacttggtatgcccagaaaaaatgaaatcatttttgtaagagccaattgtaagaaagatttactaatagtcatccttgttctgtaattattgatggagttgggtataaaggtgaaactttacttacagtgacttgccttttcatacctaaaccttggagtaaacagtttaatcattcacatcctccagaacattttgctgtgagagagaaaggagtgaaagaataaggagaaaaagaaagacactgaaaggaggcaatgggggtggaaaggaaagaaagggagaaggtagctggagagaataaaatgaaagcattcatttcagaaatgaagatagccaggtgcatggaacctttgccattcaatataagaaaattgaaatcctgctttcaaaatacatttttgttaacaccaaatctctaccacagtctctaagcaacccctaaccaccaagggatacccccagttttctaccccttaaaaaaaaagaggagaattttaggaagctggctgatccggatcttggatatctggctgtcaaagtctttatctggggtccatgaaaaggaagtaagaaaacgcacattgtgctctgggatttataaagagattcgagtgttgtttatgtttattttattattaaagcccctgtgatcttcatctccattttgtatgcacaatcttttcacagatcgacttgtgacttattgatataggaaagcattcccacattaacccaaagtagagacacacacacacgcacacacacgcacgtctggaatgagagaaacacaatcacacaggacgcgttcctgtcaggttaatttcagccagtgcctttttcaaccatttattgtaaaatcttgcctgcttttattgatgtttctccctgattatgtggagctgcaagaatgaggaaatattttaaatgaaaaataaatttaagacgtacaaacatcagataatatcacataccaacctcactattagtgaaattgaaagagtatataaataatgcaaaaaaaaatcagcaagggagagtttagtaatggaaaattccctgcaattaaatgaaacagtaatttagtgaagatatgcctcaatgaattagcatttattaattggttctcataaaaacaatttgtgtgtgtgacttggggagggggatgtttaaagtatatattgtccagagataaagttcctcaaatattcatatcaaattatgtcgttatcacattctattttgtgagaaatcccaagtctctcactggcaagttacacctgtacacagagagcttgaatgcaaaggaaaggattcccatctagatcaaagagtaaagctggttcccacttctcttggtacatttccaaatgtgaaacgaatgagggacacactggcagagtcttctatgcttaggaacatccaaaccgggccgcaagaagactccctgaggacccagctcttctggggcacagctagctaagccagagctaagccagggctggtttgtggttctggtcccccagcctgctccagcatcctctccggctcaggcaggaactgcagtttgtaatctcagcgaggagcttgctagggttgactggtgcatggatgtgtttactttctctcgccacagttggtctgtcttcagttctaagcattttaaagctgctctatttatcagtccaagaagtgctgagttctccgttgagctgagaagctttgagctctatggttctgagtacacgagaagccaaaagataaaagaaactgtttcatttaagaaaaaaaatgttttaaaaagtgggggcaggggaatgaatgagcccaccttcaagactgcagattagttttgcttttgttttagttgaaaacttggtgcactgccccccttcgggtcctcattctcttcagagatagaatttagtattgaaaacaccctctaagagaggagaatatgccctcacgttatcttctcttagagggtgtagagttctttgcgggagggattctttccaaatgcagattggaacaccttcttcgcccaggttcttctggggagggagctaacacattctgcctaggaaatgcaggcaatgactactttcagcaggagttctagacattcctttcgtggggaaggagtacagagcatgacaatccaggagtctcttggctcctgaaaactccactctgccacaccaatcctagttcatccagtcagtggtcagtgaccctgggatggatggaatctctgcagtgaggtggagtaggaagaagcatccactcgtctttgtttatctacagtaatgacacttttaaatggatcttgaggattcataattatttccttaggtccagagttagggctgacaagactgtttgggttgctgaaagcccctctagaccccttcgttggccagatagaaatacaatgagcaaatttctcttatataagccactggccagaaaaatattcataggaaggcttctgtcttaaacctgtaattcatgtaactgagtctgggctttaccttgcttggctggtgggggtccttccccaggaatgagtctcgatagaaaccagcatctgtttactgaggcatgtctaagatcaaggggaagaaagtccaagagtccccgaaggatacttgggttctgtttctgtgtttcttcccgtggaccctccatagtcctgaatgccatataagatgccagcaatccctgtggctcagccaagccagcctcacagctcctcctgctctgcccatgtcacatttacatccaaagaaaaagaacgtctgcacaagagctgagcatacctggcacttagtgagctctcaatgaatgaaagctgtgattcttctctctgaggactgccacaggtgtggtgtggtgctgagagcagatgtattcatcatctcatttaattctcacaactctgccaggcaggtattgctacgacatttttatagaagagaggggaaggaactggtgttcaaagaggttgataagactccaattcccctttccactgctccctacctcaaccacccaaagtccagctcatcagaactcggctactagatgatcgacacctggaatcctagtggaaactcccatcagaacccttgataagaaggcccaagtgcccgtgctggcagtgacaggcagagccttccgtctatcagcttgctttcctcatcagtgttccccactctccagtttaattaaaatacacccctttccagtatggttctcagtcttcccatctgtgaaatggagaagtggttcctgcctggatgcctctcctagaagtagctatgagaaggaaggagatgatcagccacttggaaaggcagagggagggaggccttactttcacacatccccccaaggctgccgtgtctccatctgcactggaaaaaaagcagctatcctcaggcaccacaagttgaaggaccctggggaacttacttccctaacttggcatctcccaagcacactcagcctccctgcctaggttcatcttggatgtgatgcgaacagcttcagagtggctggggaggcttccccatgctgttaggggccagcactgggggccccatccacaggcagcatagctaggagtggtggccactggaggtgccggttgttatgtcccaaagcttaggttcatcccctctgccacttcctcaggatccctctcactcaggggcttaaaagcaaggcatttctcttttggagcctctgcagaggttcagttttagaacgttagcttgaaagaaagggattttattttaatgttttcactttttcatgtagaaagtagctgcttagctcccgggctctcagatgaaaacctctctttggtttaagcagagggagagattgagaaagaaaaaataattcattcctccctgcttttaactttttttcgtcatcttcagccacaatactcattggttttgtcttttttatttgtcttcttaaatggccttggggtgacatgggtagttagtgctaattagtccactaggacatattgtgactgtcagggcagcacagcagaagggtccaggagctggttgggtgacgcacctaagagagaaatggcttaatctgctgtcatcggtgtgtactacagtgttcgcgcacacccaggccctctgtgtgttgcagttttgattcttcggcatctccaggaggacagtagaacttattattcttgggataaactcaggggccatgaggtgtcaagagaatgagaggcttttgaaatcagcgtgaagccaggatgaaagcccctgccctgcaggcagaagaagaaggcaaagcccgggcttccatcttggcccagaccttgctgtttttgtgtgaacttagtcaagtcagatgtctctctgggcttgtacttcccctttataaaatatggggatgctgcagggcttctggggagtcatgtgagtaaaacctgtctcctcacctggcacatagctgccactcaagacaattttctgtgctccatgtagtagtcaccaaggagtggagtctccagaacacattcccaaagtcccattgtcgtagtatttcctgtgaaacagccaccagtaacttgcaacccagtacttcgttccatttaaaatttaggacagacttttcaataattcatgtggacaaaataatagatctaccacctaggagtactgggattaaatgaagggacgcatagaaagtgctggctatgacctctgcggctgttatctgctgttaccacagcctgaaatggaaaaggatgccttagttcaccttaccagaaaacccagtcatagggaaaacactaagcttttgatagaatggctgtctgtggactgtgtgttgaaatccagaacattctaagggtttaatagagttggtctttgagcaaaaatgagctcaagtgggtttgcagttatgctgtgtgtgcggctaagacaggactgcaggaagacttgcctggggtacttgtttttaattgacacggaatcatatatttatttttaaaaaattaaatccacgtatcctccaccttctgctttcttctctctccctccctccccacctgcctctgtctcacaattttctactttgggtaataataatccagctttggcctgatagcaaaccctggttgacatttaaaagtctctgtgattagctgagcaccaaatctctgacttaagctttgctttgctcctttgcttcaacactgagcaaggtagaaggcacctctacagggcagggagctggagtcttgctcttccctttcaagaaggcagacccgcagaaccaggaggaagaatgatcagacaaaacaactcagtggtaggaaaaggactgaacactaacaacccattcggcaggagcaccaaagttcatttttcttgaacagtcaccccagcacaactatgttgtggctgttgacaggtaaaccccatctggctttctccagtctgctcctcattgttccagagccagtgtgctccatgacggtctacactggggctccatctcagggctgctggacagtttgtggcaaaatgtggcagggctgtaggtagaagtgccatggagatacttctgccaaatgaaaatgcttactggacacttccaatgcctaggctccatgccttcacagatatgcaaactttcccctctgtaggccttacatctctttggcagtatgaaaagacctgggtccttcgagccttggggaccttcctgggccccccatattccctggggacatggcagtaccccataccaggaaggtccccatggcccatggcccacccccactgctggccatggggctgtctagacaggtgccccacactgtgacaggcctgcctgggcctcagggctcccccttttgcaggtggcacctgctttcaagggtcctgcttacagtgacatagctgctgtcctgagactctcctttcctcagggcctggctgggggccatgccatgtctgcaaagcacttggtcacgtgctgcccacattccagctgtcctcacccatcccagctccaaagccacctccccatgaagctgtccatgattcctcttcctcttccccacctccccaaggtctcctagcactctgtttgtacggcatgccttgcagtccaatttttggagaaggcttgatctctgtggctcgcagcttccagacttgagttacttgagtacctgggacaatgtatgcctcgcacatctcagaagcttcataggctttcattatgctggtctacctggatccagagttgttcaaggctagagggggctcacagatgagattctgttgccacatcttaccagtgaggaaactgagacccagagaggtatgccccgaccctggtcccacagcccttgtggcagagcagacactccatctcatcaccaggactctttccatgaccctgtggtgacttccagggcatgttgagttagagtgagggctgacccaacccagggagcctttgctgtggcctgtgctgcataagcaggacccaaggaaatgaaggggcctccttcgcctgctgacagggactgggaagcccagtgacagctgctgagacatacagacacacacccatgcacactcacatgcatgcacacacatacacagcatatgtacaacactcacatccaaacatacagacaaccggggggattagggtgaagcaggaaggcactcaaggtgcaaaattccaggaggctctctctctcaggctcacgcaagggcagggttggccctgagagcaagtgcctccttagatcttatagcctggacacctggctgtcctcattctagtcccctgtatccatatgacacacacagtcatacccagttacacacacagaccacagtactcacagacatatacatgcacacatgaatacaatattccccatctcacacacataaacatactaaaagtaagcctttaaaatgtagaagtatgtgcagaagactgtcctaggtctgtgggtaatttaaaaagaccagagaaggccctgctttcagagaccctgagaaatgcagctgggaagttacaggtgtgattgatgagtcccggctgtactcacagttgctagaaaggaagtcataatcgatgcactggggaaagtagggtgtaagctatccaggaatctgctctgtgctatgcatctatttaggcatgaggtcactgacatgtgacctccctgttcttgcaacctgtggtttaaggtctgagtagaggaataccagtgtccaaccatgagcccctcctggccactagctcctcactgaagttacgggtcatgggtagtcatggagccctgtagagaccttttggtccagcattcttgttttcacataagatccaggggcagccagtcatttgcctgcatcagcccctagcaccactaggtctctggggttcacagtggctcttcccagatgaggacagagctaccaagtgggcagcagcagtagcggcaggactcatccactcaagaactggcctcaaggtcccccaagaatgaagcactgaaggcaggtggctgccagctagcatgggcaggcctctctgctcagctcaggatattctctctaacattctgtccttgctcagaattcctgggccactctgcgcctgagacccctcagccccaggcagttcaggcatgttctgtctactacactctaaaggagaagtgtgaacacaaaccacagccgcatgcacaacaccgagcttgtttctccacccacatagactgtatttgtcactattatacacaatatggtgccatcatgcatattttgtacatttgatcaaccaatatttatataaaactttcataaacactttcaaacagttttaccccacagggtgggcagaggtgcttgtcaatataataaaactgaacaacagtggtagaaaaaggtacacttgtacttatcttcaagtttaagatgtaaattttttctgttcaatggccactacctcatattatttttaggatctgggatcggacttagcaacacattatgactttcaagaagttgagctcactgttttgtggcgttctttgcagaacaccatgaacttccgggtgccccatgtgctgacaagtgtcagaacagctggtgtccagctgacgtgaggctggacttgtgtgataggcacgttgtggccatagctccccactctgtgaaatgatgagatcgacatgcctccatccatcagtaggatccccagcatggagaatttacaccgtcacccttcaaagaaaggagccaagtcctgggcacctcctctcaccttgactttcctacaaaacacccttctttcttggcaccagtatagcacatgtgtattggtcatttaggagcccaggtgccttgtggcagagtaaagacacacacagaaaggctggtcttttcttactcagcatccctggagcacacccagaacatgatgccttccttgagatttcctttaaagaccctgtcacccctgaggtttccatcccagctacctacagaagtcgtgatttcttttgtctttctctcagcttcacagacttcttggtccaccatggggagggcttctattcccagtcatccactgtcctgtggtgaacctctctcctctcctcctggcccatttctctcccaagtgtgtgctcagtctgcaccatgtggccagatcatcttaggttttgatccagctcctaaagaagcactcactgccccttcactctctcactctgacttcccagcacttgggttttgctgcctctgtgtctggagtgctccatgcaaatttctcaccccaaccactggcatgctcagttacctttagtttttatgatgtgtcctcacccatcctctggccacacaaggctcaagatctaactccaaattatttcaaagagcattattactcaactattcaatttagtaagtcaatgtctactaagcccctcagtgtggcaggcagggagttaggctttggggttatggaactcaggagaccatgcctctgccttcgtgctgacattctagagataggaaagcaaactgaactttcaccataatcacagagagaaagcaaaggcttcagtctagatagacacaaaatgctgagcaagtaggagagggaggcatggtgagctctgaccgggtcagggtgggattccttaaggtggctcagaggagaaaccagccccagcagagatgcagagtcccaggagggtgtgcaggttccaggcaccagcagtcagccctgagggaaggagacagcaatgggaacatggtcagggttcagcccaactgcaggggttgacaagagaagctaagctatggtgttaattccaatgtgccatcagaacgtctgggtaaagtgcactcgatgtatacgttttagggcattttattcacttgtgcatgaaacttccatcctcccctggcttggcctcacgcttctgttgttggcagttttcatatccttcttggctctcttgccacagctgcatacctactgacgctgttgtcttcaggttttgcggtgattttattaagtggaaaagccatggcaataatctgtgatagctaggttattcactttttcaaaatgttctggtttctctcctctcttggctctgtttcagacaaacttaacctggtgattttccaaaataatcagatttctccttgcacttccttttaatccaatcattaacaagccattttcaggcaaactgctgatgtacaatccgagaagactttctcctacctccgtggcctatttcccactatttccgtatgcaaacccatgttccagccagctagtcattgtttccaaaatacaccatgtacattctcacctctgtgtctctgcccattcaatgcagctacctggaacacccttcccactcccactcccttgacaaagcctcagtcaagctccacctccttcccaagacctttttagacaccctttacctttagtgaccatcctgtctgacttcccactgcacctgctccactccctgggtactcagtacttgttccaacaaatgtcacttagcttcttacagtgacaacctgcctctgagctagaaaagaacaagaacccttccagatctctctctatccccagcaccttacacaaaatcctacataaggagtgaggactctacaaatgtctgggctgctggttttcacctaattctccaataacattttttattgcttccttggttgatgcaacttgcacatttgagttttgtacatgaagtttttccaacatgaaatacacctgatcctttcccatgatattgctatattacttttctattttctttataataattggcaatgagggaactgagaaagcaagaaatgcagcctttgagggaacctgatgcagccattcaggccggagctgccccactgggatacctgcctggtcctagaggcatcttgtaggcacagaagcctatgcttgaaggccagatagccaggttgagcagcaatgggcactgggagtaaaaaacactggcaagcctggggagtttgaaccaacaagggaccttcctagtggatgctgggtgtcgacttggcagggtaattggtcagatttagggtgagagcatctgtgaggataaaagattacaagattcctgtaattcctgcagactgggaatacagctccaaacaatatctagcacatagtagacatatactaagtgcttcacaagtatttgtaaaatggatctttcttttcttcttttttcctctccttcttccttacttccttttttttcttcttctttcttggctttagataactgtttctcaagtgtggtctatatcaaaacctcctgggatttttgttagcaaatatggagccctggaatctgtatccttcacaagctcccagggatttttttatgatcagcatttaagaaacactgatctacagcccacccacagtctttcccatgtggagtccctcatgcctgcctgctgggggcacagcccttctttttgcactgtgcctcctcctcccagagatctcccatctggctatgggtagaagcagatcagatttgaatgcagtctcaggtctgcccctaactggctgtgcacatgccatttgagcctccgagatggcatctttatctataaaatggggcaaagtgccagccccacctacctcatgggattgttgtgaaaactaatcctggatgcaaccaagtccaacaactggtgtttgttgaactaaatttaagaatcacttacttgacagtattttggaagggccctgtggatgtcaggtgagtttataaccaacatttagactggatccagggtcagaaagttcttgaaaggaggagaagcctggaggtcctggtaattggagggaatccagcctggcatttggaatatttgctgtgctgatacactgatgttctttcactgaaaaaaaacaaaacaaaacaaaacaaaacattgccacatgatgcaaggatcacaaatggagaacaagatgatgaacaagatggtagcaagtatagtaatgtcaagagaaacaggttttcaccaaaagagggtaagctattagaaaggattttaccctctacttgactgactgaacctgccttacacttaagagtcatttggagggaactggaggggcagccagttaccctaggagagcagcctccaggggctgcccaagcctgctgtgtgaaattcagggctaaagctctaaaactctgttgatctgtgcatgcgtttgctagcgctgcagtgacaaagtactacaaactggagggcttacataatagaaatttattgtttcacagttctggaagccaaaagtgtcaaatcaaggggtcagaagagttgtttccttctgaggctggaggagaatctgttctgtgcctctctcgtagctcctggtggtttgctagaagtctttggcattccttggcttgtgacagcataactctgatattcatatggctttctcactttatctctgtatccaaatctccccttttcacaaggacttgatcatattggattaggcccaccctaatgacctcaccttaactagatcatctgcaaagaccttgtttccaaggtgctagggtggtgggtggagacaggggagagactattcaattcataacacctaagtattgtgtctccttagtccgtttcagtccccacccagccctgacttgactctcagctgctttgggtctgagcaacaccgctgcagaagctctgatttggagctgacagaaaaagaaggggaaggtgacatccatcctccagaacctttcctattgctccaacagaggaggggactccccctcccaagccagaatcccccaaagagagcctgaagtccaggttcaacacttagaaaaggcgagtcatggtggctcacacctgtaatcccagcactttgggaggctgaggccagaagattgcttgagcccaggagttcaagaccagcctgagcatcatagcaaaatcacctctctacaaaaaataaaaaacacttaagaaaacaaaaaggataagcaaacaagctgatacaagaacctaaaatcggccgggcacagtggctcatgcctgtaattctaacactttgggaggccgaggcaggtggatcacctgaggttgggagttcgagactagcttggccaacatgacgaaaccctgtctgtactaaaaatacaaaaattagctgggcatggtggtgggcggctataatcccagctgcttgggaagctgaaggcaggagaattgcttgaacccgggtggggcggaggttgcagggtttcagtgagccgagatcgcaccacttcactccagcctgagtgaaagagtgaaactctgtctaaaaaaaaaaaaaaacctaaaatctttcagggcatgacttgcttcaggacatgttctgcgcaaacctcactttcttcctccactctaccaacatggccccagccaagaagccactaagctcccaaagggctaagacagggatttaggtcagaacgctgaggttctttcttggttctgccatgaggtgaatctgtgacattagacagctcacctctccttcctggtcaaggatcctctcagaagtgtgccttgcaactctgccactccacagacactgtgcacatccaccttcatagtctgtaagccgtggcagcccactttgttaccatgcaagtcatgtggcagcccataggccccactgtgtgctaccttccctcatcttatggcacgcccagtgtcacccctggtgttttgtcacataggaaggttactcaatgtttccctctagagctctctctgtaccagcttctgggggtttctggcctctgttccccggctgagggcagtcccagagttgtagacattaggactggaaggatcatctgcttctgtcaagccagatgaaaaaactgaggcacagactggcatcgtcacagagtgggcagaacctaggcctcctaattctcagcaccccctgtttcctctccagaaactgcagcctgcaggctgcatctgctggcctctgtcccttccccttttcttctgcagcagtgagggcagcttttagagtggataatctccttcgccatggtgcctgctatcgacaggtgtggaaacaacagatgcacggttttgtcacagattttgctcctgtgtgtccctcagaaaggcggttccccttcatttgttcttacctgttatggtccccaggatggccaggccctccttctgtcccccaccctgaagactctgcaactcacacacacagtcacacacatacacacacacacacacacacaaaacagtcactctctctctctctctaaacgtgccctaattcaggctaaagcccaccctttacaaatgcctcctccatgagctagtcaagcccatcaggttgtatcctagttaagatctcagaagcaaagaatctcggccttcaaaagaaacttagaggtcatttagttcaactgtccgggtgagggaggcatctttatgtgacttcattatattcaatattccctagttcctctggcttctcagtctctgcagtcaccccagctacagctgttatttccttcctattcccccttctccccatcctccctacctacccctactctcatggtttcctgccctcagcaggggttcttctcaccatccctctatttccctccttacccatctctgagtgatttttaaatcagtgcccactaaactcacatttatagtattataactttgagctgtagaacctaccagtactttatgtcctttactatccatccccatccccaacacacacacatactcacacatgagcacacacccccacacccactcattcatacacacattcacacagacacccatatacacacctccacagatattccacggagctacttgtggacagaattgaaggagactgtgcatgtaaatgtgttgaaaatctttaaggttctataatatgtcagggactattaacttgtaagtttctcaagggcaaggactgtcttctactcagaaaccatcaccccacatacacacagcctggaatattattagacacagagtaggtgctcactgaattgaaatctaatgtactgaaaattgctttaatataaacccattaaaaaaaaagcatcagtagccacaggcctctgacctcagggggagttgagggtgtagtgcagtaacttgtacagtcgctaagcatctaaacgcgtgttcggcaggtgctgccatacctgccttgcctgtttccctccccaaacgcagagaccctggaccttccttctgcagcccagagggcccttccacagccctggtgtgcgatgccaggagtctgcaagtgtctaggaagctcagtgggaaggatctgggaagaatgacctctagtaaacctgcagggagcactgggaagctccatttgcagcccctgactagaagttcatgtttcatcaattaatgctttcgataagtgtttgttgacatccacagagtagatataaactctaggctatcaacagaggagatttttaaaaatacagattcagggatgctatgccaaaagattctgactgaactgacctgaggcgggaagtttctggactctccaggtgattccagtgtgcagctgggaggaggaaagcactgctctacccactgcaaagcacgcctgcatggtcagatgaaagctgcacctcccctcaaggagccaggtgtctgcgggaagaacttgacaacgagattcaaagagaggacaggggctggggaggtcggtgggaggatggagaaggttctggaaggttgcttctgggaggcttctctccctgggcttctgaaggccagagtgcagggtgtggattagccatacccaaagccacattcacagagggggaagcatcactcctgcaggaaggaaaggaagtgagtcccctgcttgggaaatggtgcccaatctcagagggagaaagtggctcatctgctgttactttatataccttatattgctgatataatttataggatctaagacagcgtgaagagacctccagaaatctctgagacagcaccaaaggcaaccctacccagggaacccttggacttggtgaccttcaggctcagagcagcccatgtgtgtctcacttgcctcaagctctctggcccctgtgctcccaaggtctccagcttggctccaggaaaaggcagggcctcatgtcaagtagtacttttcttaaggagcttagaggtctattgacatttgaagcagctccatccctaaaaatccacacactgaagcccttcttgggagggaggtgacagggttaatctaagggctgggggaggcggagaaaggccttgaaaccacacagtgaagccaaccagattaatagaggaagagagaggggggtagaccattaggaagacaaagagaaaatcatgctggagcaatagaaagggaaatctaatatcaactagggaaaaataaatggagattagggcaaacaaattagctttaatgggttcaatgctaatacaagaataacagcggagctgcgaatgcctttgaggggaagatgggataaagaacctgagcagtcatgcaagcaataaagattatgcagggaagggggatggccaaaagagccagcagggagggagagagaagggaagactccgggcagatgggtaggggagcggtggcattggaggagtctgccatctttgacaggaaaggactgggacagagagctggtaagaactggggaggcagcaatcaggagggaaataaaagaaagcaaggaaactgggagacactgagggcagggatgcaaacccagagccggaaagactgggaagaaaggaggcagcgatggatgtaaacaaagagaatggaggacaaccagccagtacacaagagtaaagggaaataaaggaattaggtgccctctctgactggagaaaatttaaaaaggaaaaattaggccccaagaaaatgaaaagctggagaggacttggaagtgtgttttggaaagcacccatacttggtaggtgacgaaaggacatattcgctcttagggcggggtctggctattcctggaatacagtgctgctgccaggggtggcgccggaggtgggtgggcaaaagtaagcagtgcagagcattcactatggcatctgagagctctcagcttgagtctcagtaatgccactttgtaaaggtggagccttgaacctgttacatgccgaatctgttcctcatcttctcatcaataaaatgataatgtacttcatttctcaaagggttattataagaattaattgaaaagatgcatttaaaatactcagcttggcccaaaaataagcacctcccataatactggctatgattattattcttaggcattgactaatggggaagaggggctgggtactaaagatagctcttcctccctccttcccccacttcctcttcttttaggtccagcattggtgaaatacgagcctagtttgattctctcccagacagagtctaatccaagggaaacctctttatccatcctctatctccctcccctgtccctccccagctccctctcactattggggatgaaataataatgctaagccttccaccacagccaccctctgggctgatctaaggcagaagcatctaaggaagccaaatatcacattcgattggaagaccctcttatatctgcctgagcctcagagtgtagtagacaaggagctggcgttggtcctcatggcctcacatcttaggatcctcctgggatgcattaaagagcatagacaccccaccagggaaacagagccccaaagaccagcacacagcaacaataacaagctaggagtcaatcggtaacagcctagtcatgggcactagaaggggaaagaaggagctgggattatttcctacccctccaggcatcccagaaccctgcccttttatcattactaaggattttagaagagagagaagagaaatcaatccaggcaagaagaggggcagataggggtgggggatctttgccatttgctaataaataagttaattaacttgaaatcattacaaaaagaatcttcccataaaaccataacctccaagagggcagagacccatctttcttcatccccctatgtccccagaacctggaacagtgcctgttatggaaatggtgggtctcagtggtgagggtaatggctaacatttgtggacggtctactgaagcccaggtcctgtgtcaggtgctgcacgtgcaccatgttatttagatcacttggcacacttagaaggaaagacagaaagaagtgacagaaattcatgccaaagtaataagttagtcagaggtgaagcaggggtttctgactctcttctccatatagctttaaggaatggaaataaatgaatacatgaacctcacccactcatcagggcaagaggacagatttgaaagctacctctcagtttgggtgttattctatatatatatatacacacacacacacacacacacacatatatatatatatacacacacacatatatattccatatatggaatatgtatatatatatagaataatagaatatatgagggactgataaatgggccacccggcaagtagtagaagtttaaaggatagtggaaggactttcttcttgttgttgtatgtggctcttgtcagccaatacctcagcagcagtagttgaatcagattccagctctcagctctcccagagccagcctcacatgcccccagcaatagctgggatgagccagcccttcggagatccaatccccagctccacaggctcttcctctaaacatgtagctctgataactccagtttcttccctttgattcctccaggctgaggagcagtggttgcttcctgtagctactatctctgggctatttcagtgtttcctttgtgctcttacagccctccaacaccagacaacaattccccatattaaagcccctttgttgaaatacctaggaaggtttctgtcctctgaccaagccctggctgataccagaagagatctgaggaaaccagattttaagactggattgatcatgtccttggccttgaacacagtactgagctccttgacaatgagaactggagaactttttttttttttttttactgattgagccctggcaggcatatgcatgcagcactgcctacacagtcctgagtcagaaacttctcatggggtctctgagtctggaatgtctgagttctcagaaggggtagcatttgctgctaaccctctgcctccctagcttgagctgtctctcgtggttttttcccctgatggatgttaacatcttcccaacagagctatcaacccagtgagggaggagtctgtgtagatcacctcccatcattctccatagagtctctatggcccaggttagaagaaaaagacttcttggctcagactccaaagactagagtcagtgacagtttccttagtggtgtaaaatggcaagagtagcactaatctcacagaagactcctgcagaacacactgccacattcaaccataaagctgctctcaacagtgtgagcctggcaagcactcacgcatttaatgttgacgttgaagatctgatatgtgagccaacaggaagacctctgcattcataccctgactccttcagaagcagggcaaacctcttttttttttggactgtggaatctggaccgtcttctttaaataactcatttctgtgagtatatgtgtctgtggaaaacagaattctgtttaaggcaaagaaggtgtgggcttcactagacttgtagatctgcctccctcctcccctccctcctcccctccctcctccctccctcctcccctccctcctcccctccctcctccctccctcctcccctccctcctcccctccctcctcccctccctccttccctctctccttccctctattcctctgtccctccttccttctttttttcttccttccttctttccttccttccttccttcctccttccctctattcctctctccctccttccttcttttttccttccttccttctttctgtccttccttccttcctccttcccttccttccttccttcttcccttctttcctttgttctttcctttcaataaccaacaggcacttatattctgcttactgagactatgtcctggcttatttaaaagaaaggaccaaagagagcaggcagggaaagccagggaagactttctgtaggagggagcttcctgaaccgactcctaaggcatgaatggaaatcaatctggagaaggtgaggacgggcactccaggcatggaggacacagtcaaggacccaggagaggattcagatgcagcgaaagaatggcaagcaattctgtgttgttagggcatcaggttcaaggctcagacaggtaagaaatgaggcttgaacactaagtcagggtcaggtagtggtaggcattgtctacaagatttagtagcttggactttgccatgaagaaaatgatgccatgccttgcaaggattcttaaatatgggagtgatatggccagactaggatttagatgtgttgctcccgagctgggtagcaaaggttcacttgagcaaggttggatgtggagaccaatgagtccaggtgagtagttaactcctactcaccttccactcaggttacatgtcatttagagacatcttcctaatcagcttgagctcattctctcttgcacccccaccccattacaccctgttgtgttcttcttagcacttattccaagtagtaattacacatttatttctgtatttactttttaaatatatacccatccccagcctacctatccctagcctgaaagcttcatgaaggtagaaatcaattctatgtaatcagttctattaaaatgtttgccacatggtaggcatataaaatacatgtagaatggataaatgaatgcaggaatatttgaatgctggggacagacaggaaggtattggttaggtaaatatttaggaggtaaaacgtggtcttgtgagtattccatatgcagagaatggaaaaagataaaggctattagttgattcatgtgacatgtttactgaacacctaatataatttaataatgatcaaaacgaaagaagtcttcccctcatggagctttctatctggtgatagaagacagttatgattcatacatatatagttatgcaaaaaatgtaaaattaaaatttggacctaaagatgcaattaaatttatctatgatacctccccagtccccccaaaattcctcccttgactatgagactttttcttcccctcactttcaaccagattccaaacagcagttatatttgatgctacctttctatgacagccattcaagaaaggtaaagcatgttattagaacacccaaacagaagcctgaacctactctgcaggataaagcaaagccaccgaggaagtgactcagtgctgaaatataaaggatgagcaggagttaactagatacgacagggagacaagagctccaggaggagggaacagcatgtgcaagtgccccaaggctggggacacactgttacttccaaggttgtgcagaagaccgatgacagtgcggtgcagagagtgtggtggcaggtggcaggaggttgagtggaaggggcaggccctgagcttgcatgacagctggtattgttaccaaccaagacaacactagaggaggagcccccttatcacctaagaggaaatctccaatagaaattgaaaacaaaagttgggggaaggacctgactggggttacctgggatgcccatgatgccatcatgagatgggtagtaggtatgacaataagggtgtgtaggatcaccaaggatggccttgaagggggagagaaacactgagaactaagagaagcctgaagggagaaaacatatgtcatggagcaaataagggaacagaaccccattaaagcaaagcaaaaagcctagactgaaggtataaggaatcaggagatgggattgtcactaaaatctcttcaagagggagaacatggcaccctccaaccactcactgtccatccatggccactcatcaccaagcacatgctaagcaggaggcacagagcaggctgagcaccgaatgtgaagggaggaatgggctgcaagtatagctgctttttgagaaatttagttgaaaacaataggaaagaagagtatcatggtcaagggaagaattttttttgtttaatgtattttgaggtcagggggtggagaggcaacatagattaatttaattccatttgtacgtttaggggaaggacctggtataaaagaagaggtaagtaatgtttttaaatgggaggataattgacggagtaggattccagcacaggtagaagggcaagagatcaatgagaaacacaagccgcagctttgcctagctgctgtctttcggctacagtttcccttaggaagacaagtgtaaggcacagaggtaaccaagggtcatgcagcaagttgggggtaacagcagatgcaggatgctgctttccagcatgccagcctcttttacccagtccaagggtctcatgtgtccaggtaacccataacctcatgtgtgctggcatgatccagtgtgcagactttggacactgggattccatggccctgggacactttcttcaggagcagttggaggcacagaccctggcctttactccagaaaggcaccaagccaagaggattagctgggaggtggcacatggagatcacagacctgcaagtgagcagctggggaaggcaacaacaccaagctgagaatgccagggactgattcgcatggacaaggcctttcctttgtggaaggcgtataggcctggcatgatttgaaaggcacccaaagaggccactgcacctctcactatagccctgccaaggctcagctatcaccttgacactctatgggactaaagcaaaaagccccagatagttaagtggaaatttttgcagaacaccacattgagccattgccactttaggactgggcagagccgcaaaagataaagcaaaaggataaagaggaaagtactgaagcatgggatttgggggtcccaccatgcagaatcatgggaatccatgcaacaaccataaccaatgtaaaccatttttctatcacttgtatataagaaaacactaattacagtagacaaagacagggcccctgcctttgagtaactcataaagaaactcaaatagagaaagttactgttcaatgcagtcagtgctatgataggaatttgtgcaaaggactataggaacatggagaaaggatttccacatcttaagggtttggatattggtgcatataacaagaattttggtcaataagtgtctctgttttctttctgccatcccaactactcagagctctataaaggatgaagaaattaccaacaaagtcctaagacctccctgaatggtcacttttcaaaaggatatgtttctggacagcaagcttcacctagacctttgctgagctccaatccctttactgtacgataagtcctctctgaccccaggaaagcttgcatttcccgtctgagtacctttcactcaggaacctgcttgcatccggccaggcggtcttgtcttcctcccccatacccaccccacctccccactcacaatcctccagacatacaaagagtctttgcttatgaggcttcaaacctcttcctgggccacaccttcccccctcaccccacttcccgcccaaccaggaggctcctactcatttttggcttccggcctcaaagcccaccccacctgcagctgcatgaagaggtggtcagcacagtgggcgccaatcgtccccccaaccccagtgcaggaaggaagtctgcacccacctctgggcatttggtggtgactcacccagaagagtccactcccccacaccggacacaggaaagacaaaggtctttccattgcagagactcagcttaaaacttcaaaccataggggccatctccatctgcagccagcaggctctttccaaattctctttcctgcctgtcctacagccacactaaatgtctttcaatttcttgaaggcaccaagactttatgcatggatttctttccccctgaagaaaattcttcacctagttacctcctagatactcttccttgcagcttccctctaaccacttacgggtctccccaagcacctggacttatatccttcaagaaagataaccattaacatggtgattcctaatgtgtcttatcatatcccccaaaaggttcgaagttccttgaaggccaggattcttgtcttgttcaaggttgtattcccagtgctttgtacctgagtcatgataggcacttggtcaatgtcttgagttgaaaagaaatgaaaaccataatatacaaacaatcattattattgtcagaagaatgttggaggagtatgaagagttattctcttacgcttaatttaccagccatcacctggcctaaaccagtggttttcaaagtgtgaccctggcctagcagcattagcaccatgtggaaacttcttagaaacataaattcttagttcaatcccagacctactgattcagaaacttagggcattgtgctcagtactctgtattttaataaccctcactgccaagtgattctgatgcacactgaagtttgagaaaacactccctagtcctagtcctactcccaagattgggtcataacattcaaccatgggaatattacaaattagaaaaacgttacatttatagcaagatttgtttatctaaataaacacttctccatcctggtccccctatcttcttttttttttttttttttgagatggagtcttgctctgtcacccaggctggagtgcagtggtgtgatcttggctcactgcaagctctgccttgcgggttcatgccattctcctgcctcagcctcctgagtagctgggactacaggcgtctgccaccatgcccggctaatttttggtatttttagtagagacggggtttcaccatgttagccaggatggtctggatctcctgacctcgtgatccacccacctcggcctcccaaagtgctgggattacaggcgtgagccaccacacccagcccccctatcttcttataggggtttaagtcagcagcaggcataagttttgttaagctccattcgatagataaaaacactaaggttgaaaaaaaaacccactttctcaaatgataagactaaaacaggcagtgtcaaagaagggatcaggcccaagactctttccacagtaacacaaagtcattcagaagacagtcaaataaaataagcaccagagaattcaccgtttaggggccagaaatgtgaatgcatctttcccagcactacaatgcttgctgataacggtaaataacctctcaggtggcttcctgagggtttgggtttctaaggatgcgagtcagtccttcataataattaagagcaatgtcccacacaacttacagcgtcgttttctttttttaaaaaaaaggcacaatacccaattcatgccaccccagaatggcattttttttaaacctgcttcacatttgtagaggtgaagaacctccacctctaagaaaccttgctttcagatatagaggtcccagcctaaacacctaggtttgggtggatacggcccggaaacttctggaaaatgaggacaaagctggactgctgaaggtcttgtctgtgtttgggtggctgtctggcgcccccttgtgttcagtgcctggacccaaaagagccggaaggcaacaatgatgcagtgagggcaaatggctacagcaattcacaaatggcactctggccagtgaggaccagaggaatgggcttaggactgggcaaaggcccctctgcccaccatctgggctctcctgaaggccctccaagcactcttccagccctagtggagaagcagtcactaggaagacttgcctggacaggcataggtggaagctgtgcccaagctcacccgttgtgtccaccaggaagatgggtcattgcatccttcttgctgggtgtttggccagagggcttttcctcctgacttactgcccagggcagaggcttagagcacccccacctcccttttttttcttttttttgacggaatttcgctcttgttgcccaggctggagtgcaatgatgcgatctgggatcatcacaacctccacctcccaggttcaagcaattctcctgcctcagcctcccgagtagctgggattacaggcatgtgccaccatgcccagctagttttttttttttgtacttttagtagagatggggtttcaccatgttggtcaggctggtctcgaactcctgacctcaggtgatccgcccgcctcagcctcccaaagtgctgggattacagatgtcagccactgcacctggcccccaccccctttattaaagggaaattgagtgttctgctgaagacagcttgggcccctgaggagacattgcaaggcagttctgaatgtgctaagtcagtgggtgataatgggcactgtgtgcccagcaaaggcacttcccaccctcggccataaacagtctttaactggttcacacagaaggctggggttggctcttccttctcacctgcctgctccctgactcccacactgcagggctctaccttcccagtcatatcaccaaatcctgcccttggtgtgaaaaagaccatggcatgttcagcacaaaacagcagagccaatgacaagcatccaggcatagctctagccccagaacagggctcccctcaaggagcagccctgatctgagccttaaattctggatggatctcagctcctcctcatataagctgagttagacaagtcatataaatcagagcactaaaactctctgagccccagtctcctcatgagaaaaatggaaatctcggccctgaaattagcccagtatggctctaggtactatagagttgaatatgttggaaaatctaacagacaagtatcctcttgcctctgagtctttgcacattctgttcccactgcctggaacagttttctcccctctctccctcacttggctagtacctgtttatcttcagtctcagcttagacctcctcaggaacccttctgtgtttccttgagccaagtcaagttcccctccagtggttcccataactctctgcatgtcaccagtcccaaaagtggtcacaaaatatgttaactggctgtttgctggtctaggacctcactgtaataaaccccatgagggaagaatagggatcatgtctgccttattcaccttggcatcatcagggacctgtgcagtgcgtggcacatagttagcactcaatacaaatggatttgactggatagatgggctcagaatgaaacacaggctggggccagagagcagaggccaagtcaggaaagcagctaagggaacgtgtacacacatccatgacgtggatagattcccacagtggcctgtagcccctgtgtcagtcctggaacccagtgctatctatgcctgtgaggaccctgcaccaggtccctgctgctctggcctattagagaaagaaggaaccttgggggtcattcaggccagaagtccacagacagagctcaggccttctctgcccaagctctaccagagagtttctgcttttattcttttgtatttttttttctcaatgaggtagtgttttaaaatctggttccatgaggagaaggagaaaggtgaaaatcacctgtgccgtcattttacaaaaggaaaagagactctcagaagagaaggggttttccccaaggtcaaacggctcagtattggtatgggaagaccccacatcctcaattccttacacacttttcagagggagggaagaaaataggggattgtgatttggagtgaagggctgagtctgcctgaagagtccccaagcccaaggtgctcctgtgacaccatcccatcgtgggggatgagcatcacataccatttgtgccagcatcttgggagtgagaactggggaaggggtgcagaggggcccacagggcctggccgtgggatttcatggtcacagtcaaacacacacacacacaccagcacctgtactcatagctaatccccacccaaactcctacctgaccctgacagctgtccctgggaatattgtctccttaggccatggagggctgaaccagctgggaggggcctttgtgaatggcagacctctgccggaagtggtccgccagcgcatcgtagacctggcccaccagggtgtaaggccctgcgacatctctcgccagctccgcgtcagccatggctgcgtcagcaagatccttggcaggtaagcacgaaattcaccgcaggccgccttccccgcagggcttgacttctccagctgatctcagggcagctagagaattcccctcccagggaacggggatttgctcccaatgtccagctttggtcctgagacctgaacagttatggtggtccttctgggcctctacccagccactatttttctactgttttcttgcccttccttctttctttgtccatttatccttcttttagtttctccctctcccttcttctcttttgctccatgtctcattagctataggcttctctcctgctaaggcaagagaatcttcccccaaggtcctcctcctaccgagacctagggaaattaggccactagggaggggacacacagatgagctcccaaggtctaacccctaaaagagtgatatctgagtttgtgcttctcaaaccataattccccaagaccccagatcagtgcttcatagccctggtagcacattacagtcaccaggggaagcctgatttttaaatagcaatactgtttatgccccagggcagaccaattaaatccgaactttagggaaataggc
